(19) United States
(12) Patent Application Publication
(10) Pub. No.: US 2010/0077493 A1
(43) Pub. Date: Mar. 25, 2010

(54) GENES AND PATHWAYS INVOLVED IN BIPOLAR DISORDER

(76) Inventor: Guoping Feng, Chapel Hill, NC (US)

Correspondence Address: MICHAEL BEST & FRIEDRICH LLP, 100 E WISCONSIN AVENUE, Suite 3300, MILWAUKEE, WI, 53202, US

(21) Appl. No.: 12/563,567

(22) Filed: Sep. 21, 2009

Related U.S. Application Data
(60) Provisional application No. 61/098,503, filed on Sep. 19, 2008.

(51) Int. Cl. G01N 33/50; A01K 67/027; C12Q 1/02; C12Q 1/48; C12Q 1/68; A61K 31/7088

(52) U.S. Cl. 800/3; 800/14; 800/18; 435/325; 435/29; 435/15; 435/6; 514/44 R

(57) ABSTRACT

Transgenic non-human mammals and cells having a disruption in at least one allele of nArgBP2 are provided. Methods of identifying therapeutic agents for the treatment of a disorder associated with altered expression of nArgBP2 are also provided. Methods of assessing the risk of an individual developing a disorder associated with disruption of nArgBP2 and methods of treating individuals with such a disorder are provided.

### CROSS-REFERENCE TO RELATED APPLICATIONS

[0001] This application claims the benefit of U.S. Provisional Patent Application No. 61/098,503 filed Sep. 19, 2008, which is incorporated by reference herein.

### STATEMENT REGARDING FEDERALLY SPONSORED RESEARCH

[0002] This invention was made with government support under grant number, R01 NS42609, awarded by the National Institutes of Health. The government has certain rights in the invention.

### BACKGROUND

[0003] Bipolar disorder is one of the most common, severe and devastating neuropsychiatric disorders, affecting 3-5% of the population worldwide (Shastry, 2005, Neurochem Int. 46:273-9). It is the third leading cause of death among people aged 15-24. Despite the high prevalence and severity of bipolar disorder, remarkably little is known about its neurobiological basis. Neuroanatomical and functional imaging studies have implicated prefrontal cortex, striatum and amygdala in the pathogenesis of bipolar disorder (Hajek et al., 2005, Bipolar Disord. 7:393-403; Strakowski et al., 2005, Mol. Psychiatry. 10:105-16).

[0004] Many lines of evidence strongly suggest that bipolar disorder has a genetic basis. Concordance for bipolar disorder is greater among pairs of monozygotic twins (79%) than among pairs of dizygotic twins (19%). Family studies of bipolar disorder also indicate that the risk to first degree relatives is 10 times greater than that for the general population.

### SUMMARY OF THE INVENTION

[0005] In one aspect, transgenic non-human mammals including a disruption in at least one allele of nArgBP2 (also known as SORBS2) are provided. The transgenic non-human mammal has a phenotype distinct from that of a non-human mammal of the same species lacking a disruption in an allele of nArgBP2. Neuronal cells including a disruption in at least one allele of nArgBP2 are also provided. Neuronal cells from the transgenic non-human mammal are also provided.

[0006] In another aspect, methods of identifying a therapeutic agent for the treatment of a disorder are provided. In the methods, the level of a nArgBP2 activity or nArgBP2 expression in a cell is evaluated after contacting the cell with a test agent. The level of a nArgBP2 activity or nArgBP2 expression in the cell is then compared to that of a control. A change in the nArgBP2 activity or nArgBP2 expression in the cell as compared to the control is indicative of effectiveness of the test agent to treat the disorder.

[0007] In yet another aspect, methods of identifying a therapeutic agent for treatment of a condition associated with a disruption of nArgBP2 are disclosed. First, the test agent is administered to a subject with a disruption of at least one nArgBP2 allele. Then, a phenotype associated with disruption of the nArgBP2 allele in the subject after treatment with the test agent is compared to a control. A therapeutic agent for the treatment of the condition in a subject may be identified by the ability of the test agent to cause a change in the phenotype.

[0008] In still another aspect, methods of assessing the risk of an individual developing a clinical disorder associated with a disruption of nArgBP2 are provided. The method includes evaluating the nArgBP2 genotype or the expression of nArgBP2 in the individual, and then comparing the nArgBP2 genotype or the level of expression of nArgBP2 in the individual to that of a control. An altered nArgBP2 genotype or altered expression of nArgBP2 as compared to the control is indicative of the risk of developing a clinical disorder.

[0009] In a further aspect, methods of treating an individual with a disorder are disclosed. The methods include administering an effective amount of an enhancer of a nArgBP2 activity to the individual to ameliorate the disorder.

### BRIEF DESCRIPTION OF THE DRAWINGS

[0010] FIG. 1 is a set of photographs showing the results of an in situ hybridization for nArgBP2 mRNA. The photographs demonstrate expression of nArgBP2 in the cortex (CTX), amygdala (AMG) and the striatum (STR).

[0011] FIG. 2A is a cartoon depiction of the gene structure of nArgBP2 showing the 20 exons and the deletion of the brain specific exon to generate the nArgBP2 knock-out (KO) mouse.

[0012] FIG. 2B is a photograph showing the results of a PCR demonstrating the generation of heterozygous and homozygous nArgBP2 knockout mice.

[0013] FIG. 2C is a photograph of a Southern blot analysis of genomic DNA from wild-type

[0014] (WT) and gene targeted mouse embryonic stem cells showing disruption of nArgBP2 in one allele of the knockout mouse.

[0015] FIG. 2D is a photograph of a Western blot analysis showing the lack of nArgBP2 protein in brain lysate, synaptosomal membrane (SPM) and postsynaptic density (PSD) preparations from nArgBP2 mutant mice (KO). The same blot was reprobed with an anti-β-tubulin antibody as a loading control.

[0016] FIG. 3 is a set of graphs comparing the behavior of wild-type and nArgBP2 knockout mice. FIG. 3A-B demonstrates that nArgBP2 KO mice show increased activity in the open field test. FIG. 3C-G shows that nArgBP2 KO mice show risk-taking behaviors. FIG. 3H-I demonstrates that the risk-taking behaviors of nArgBP2 KO mice are not due to the altered level of anxiety since their behavior in the dark-light emergence test is similar to that of WT mice. FIG. 3J demonstrates that nArgBP2 KO mice show much less depression-like behavior as indicated by the dramatically reduced time of immobility in the tail suspension test. In FIG. 3, *p<0.05; **p<0.01.

[0017] FIG. 4 is a set of graphs showing the fearlessness of nArgBP2 knockout mice as compared to wild-type mice. FIG. 4A demonstrates that WT and nArgBP2 KO mice respond equivalently to foot shock. FIG. 4B-C demonstrates the reduced fear conditioning of nArgBP2 KO mice.

[0018] FIG. 5 is a set of graphs depicting the reduction of mania-like behaviors of nArgBP2 KO mice after treatment with lithium (LiCl) as compared to WT mice.

[0019] FIG. 6 is a set of graphs depicting the increase in weight and average food intake in the nArgBP2 KO mice.

[0020] FIG. 7 is a set of graphs showing the altered synaptic transmission at cortico-striatal synapsis in the nArgBP2 KO mice as compared to wild-type controls. FIG. 7A is a graph demonstrating that nArgBP2 KO mice exhibit normal cortico-striatal field potentials (total fEPSPs). FIG. 7B is a graph demonstrating the normal relationship between stimulation intensity and NP1 amplitude in nArgBP2 KO mice. FIG. 7C is a graph showing an increase in the NMDA receptor fEPSP peak in nArgBP2 KO mice. FIG. 7D is a graph showing an increase in the NMDA receptor fEPSP area in nArgBP2 KO mice.

[0021] FIG. 8 is a graph showing the altered synaptic NMDA and AMPA receptor compositions in the nArgBP2 KO mice as compared to wild-type mice. Data are shown as relative levels in nArgBP2 KO mice as compared to wild-type controls. β-actin and β-tubulin served as loading controls. The * indicates p<0.05 in a two-tailed t test.

[0022] FIG. 9A and FIG. 9B are graphs showing the circadian period length and the circadian period variation, respectively, of control WT and nArgBP2 KO mice when maintained in a dark environment after being raised under 12 hour light-12 hour dark cycles.

[0023] FIG. 9C and FIG. 9D are activity traces of individual WT and nArgBP2 KO mice when switched to a dark-dark cycle (arrows in C and D indicate the switch to dark-dark cycle).

### DETAILED DESCRIPTION

[0024] As described in the Examples, a genetic approach was used to study synaptic development and dysfunction in mice. The Examples demonstrate that nArgBP2, a postsynaptic protein at glutamatergic synapses in the brain, may play an important role in bipolar disorder. nArgBP2 was originally identified as a protein that directly interacts SAPAP3 in a yeast two-hybrid screen. SAPAP3 is a postsynaptic protein that interacts with PSD95 and Shank families of proteins to form the PSD95-SAPAP-Shank scaffolding complex, which is critical for the assembly and function of glutamatergic synapses. However, the function of nArgBP2 at the synapse is completely unknown and there are no previous in vivo studies of nArgBP2.

[0025] As shown in Example 1, nArgBP2 is highly expressed in brain regions that are strongly implicated in bipolar disorder, including cortex, striatum and amygdala. Transgenic mice with a deletion in the neuron specific exon of nArgBP2 were generated to analyze the function of nArgBP2 in vivo as described in Example 2. As demonstrated in Examples 3 and 4, genetic deletion of nArgBP2 in mice leads to mania/bipolar-like behavior including but not limited to increased activity, compulsive/repetitive behavior, risk-taking behavior, hedonistic behavior and anti-depressant-like behavior, resembling many aspects of symptoms in bipolar disorder patients. Remarkably, all these behavioral defects were corrected by treatment with lithium as shown in Example 5. In addition, as demonstrated in Example 6, nArgBP2 mutant mice are obese, a common problem with bipolar patients. Examples 7 and 8 demonstrate that nArgBP2 knock-out mice had altered synaptic transmission at the cortico-striatal synapses and had altered NMDA and AMPA receptor compositions at the synapses. Finally, Example 9 demonstrates that nArgBP2 KO mice have altered circadian patterns, another common problem in individuals with bipolar disorder.

[0026] The human nArgBP2 gene maps to a region on chromosome 4q35 which has a strong linkage to bipolar disorder. The mouse nArgBP2 nucleotide sequence is included as SEQ ID NO: 1. The nucleotide sequence contains several large introns and is alternatively spliced. The coding sequence is included as SEQ ID NO: 2. The mouse amino acid sequence is included as SEQ ID NO:3. The neuron specific exon is found at nucleotides 287,935-289,702 of SEQ ID NO: 1 and nucleotides 1781-2779 of SEQ ID NO:2. The particular deletion made to generate the knockout mouse in Example 2 was insertion of a STOP codon in the neuron specific exon of nArgBP2. Insertion of the STOP codon blocks production of the brain specific form of nArgBP2 in the mouse to produce a brain specific nArgBP2 KO mouse. The sequences are available in GenBank. The GeneID numbers for human and mouse nArgBP2 are 8470 and 234214, respectively. The human nucleotide sequence of nArgBP2 is provided as SEQ ID NO: 4. The human coding sequence is provided as SEQ ID NO: 5.

[0027] Transgenic non-human mammals with a disruption in nArgBP2 are described. Transgenic non-human mammals include all non-human mammals having a disruption in the nArgBP2 gene. Disruptions in nArgBP2 include any alteration to nArgBP2 which results in altered expression of nArgBP2 as compared to control healthy subjects. Altered expression includes both decreases and increases in expression. In particular, such altered expression may result in expression of a phenotype as described below. Suitably mice are the transgenic non-human mammal. The resulting transgenic animals may be called knockout mice. The production of nArgBP2 knockout mice or other knockout mammals can be carried out in view of the disclosure provided herein. Knockout mice may be generated using a variety of different techniques, such as those known to those skilled in the art. Mice having a mutation in the neuronal exon of nArgBP2 are disclosed in the examples below. The skilled artisan will also realize that a nArgBP2 deficiency can be produced in other animal species to generate other transgenic animals with altered nArgBP2 expression. Those skilled in the art will also appreciate that nArgBP2 protein levels may be affected using other techniques such as RNAi. Cells, tissues, organs, and progeny derived from the nArgBP2 deficient animal are also encompassed and described herein.

[0028] A knockout mouse is a mouse that contains within its genome a specific gene that has been inactivated by disruption, for example, by deletion, insertion or gene targeting. A knockout mouse includes both the heterozygote mouse (having one disrupted allele and one undisrupted allele) and the homozygous mutant having two defective alleles. Gene targeting is a type of gene recombination that occurs when a fragment of genomic DNA is introduced into a cell such that that fragment locates and recombines with endogenous homologous sequences. Such recombination can be as a replacement for deleted sequences but also can be an insertion of additional DNA. One important example of such insertion is the use of antibiotic resistance genes, such as the Neomycin/G418 resistance gene. Antibiotic resistance genes are well known and useful in helping select for modified cells with the appropriate insertion. A further example of deletion in the nArgBP2 gene is the deletion of one or more of the exons of the nArgBP2 gene. In the examples, the neuron specific exon of nArgBP2 is deleted. Disruption of nArgBP2 also includes, but is not limited to, nonsense mutations, single base substitutions, missence mutations or any other genetic alteration which results in aberrant expression of the nArgBP2 polypeptide as compared to the wild-type.

[0029] Gene disruption can result from a deletion of a portion of an endogenous gene or deletion of the complete gene. These substitutions and deletions can cause the protein encoded by the nArgBP2 gene to be expressed incorrectly (and thus not function properly) or to not be expressed at all. In another embodiment the disruption in nArgBP2 results in reduced expression of a functional nArgBP2 protein as compared to animals lacking the disruption. Levels of protein expression can be quantitatively assessed by a variety of methods known to those skilled in the art including, but not limited to, Western blots, protein assays and functional enzymatic assays.

[0030] The knockout mouse disclosed herein exhibits one or more phenotypes that distinguish the knockout mouse from a control mouse that does not have a deletion in nArgBP2. Control mice express functional nArgBP2 and exhibit the control phenotype. Comparison of the nArgBP2 deficient mouse to the control mouse was made under conditions wherein all mice were raised and maintained in the same environment under the same conditions. In the examples below, mice with a disruption of the neuron specific exon of nArgBP2, such that the mice have reduced nArgBP2 expression, exhibit any one, or any combination, of the following phenotypes: increased activity, compulsive behavior, risk-taking behavior, hedonistic behavior, obesity, fearless behavior, psychosis, repetitive behavior, irritable behavior, altered circadian patterns and anti-depressant-like behavior.

[0031] The phenotype of the knockout mouse of the presently disclosed subject matter indicates that the nArgBP2 protein plays a significant role in affecting the expression or pattern of phenotypes associated with bipolar disorder. Without being bound by theory, the nArgBP2 protein is thought to be involved in transducing/regulating signaling and structural changes at the post-synaptic site. In the Examples below the nArgBP2 knockout mice were shown to have altered synaptic NMDA and AMPA receptor compositions and increased synaptic transmission at cortico-striatal synapses.

[0032] Importantly, results presented in the Examples below indicate that the absence of functional nArgBP2 in an individual contributes to one or more disorders. A disorder that is associated with or directly caused by a reduction or absence of nArgBP2 protein in the diagnosed patient is referred to herein as a nArgBP2 disorder. A nArgBP2 disorder can result from aberrant expression of a nArgBP2 gene or aberrant function of an expressed nArgBP2 protein. One of skill in the art would predict from the phenotype of the nArgBP2 knockout mouse that an individual with reduced or absent functional nArgBP2 is at risk for development of a number of clinical disorders and complications known to arise from synaptic abnormalities, including psychiatric disorders that are thought to arise through defective synaptic signaling, such as bipolar disorder. Causes of a nArgBP2 disorder are not limited to loss or decrease in function of the nArgBP2 gene or protein. Indeed, overproduction or over activity of nArgBP2 in an individual is also expected to produce a disorder which manifests itself as distinct from controls.

[0033] The phenotype associated with a disruption in nArgBP2 may be affected by treatment of the transgenic animal with therapeutic agents known to treat bipolar disorder, such as lithium. In general, treatment of the transgenic animal with a therapeutic agent effective for treating bipolar disorder results in the transgenic animal behaving more like a wild-type control animal. In some cases, treatment results in the normalization of all of the phenotypes associated with bipolar disorder in the nArgBP2 knockout animal. Treatment includes, but is not limited to, an amelioration of at least one of the symptoms associated with the bipolar disorder affecting the host, where amelioration is used in a broad sense to refer to at least a reduction in the magnitude of a phenotype associated with the disorders, e.g. symptom. As such, treatment also includes situations where the pathological condition, or at least symptoms associated therewith, are completely inhibited, such that the host no longer suffers from the condition, or at least the symptoms that characterize the condition. Therapeutic agents that act as enhancers of nArgBP2 expression or function are expected to result in treatment of the disorder.

[0034] Also provided are neuronal cells having a disruption in at least one allele of nArgBP2 or having altered nArgBP2 expression or functionality. The cells may be derived from the transgenic animal with a disruption in at least one allele of the endogenous nArgBP2 described above. Cells derived from a knockout mouse refer to cells either in the mouse itself or separated from the mouse and expressing the disruption in nArgBP2 as described herein. Those skilled in the art will appreciate the cells may be derived from transgenic animals using a variety of techniques. Such cells may be derived by harvesting embryonic neuronal cells from transgenic animals. These nArgBP2 knockout neuronal cells may be used for a variety of purposes apparent to those of skill in the art including but not limited to, cell based assays, molecular assays or intracellular assays, such as cell signaling assays. For example, the cells may be used to study the cellular basis for the phenotypic behaviors associated with bipolar disorder and the role of nArgBP2 in normal neuronal cells.

[0035] Methods of identifying a therapeutic agent for the treatment of a disorder are also provided herein. Briefly, the level of a nArgBP2 activity or nArgBP2 expression in a cell after contact with a test agent may be evaluated and the levels detected to assess any change caused by treatment with the agent. For example, the levels of nArgBP2 activity or expression may be compared to those in a control or to those in the cell prior to contact with the test agent. The cells may be contacted by any means known to those skilled in the art and include in vivo, in vitro and ex vivo methods. Cells within or derived from a nArgBP2 knockout mouse may be used. The cells may be neuronal cells. Control cells may be cells from a subject that does not have the disorder, such as cells from a control mouse lacking a disruption in nArgBP2. Control cells may also be cells not contacted with the test agent or prior to contact with the test agent. A change in the level of a nArgBP2 activity or nArgBP2 expression which causes the levels in the cell to become closer to those observed in a cell lacking an nArgBP2 disruption is indicative of the test agent being a therapeutic agent for the treatment of the disorder. The disorder may be any disorder associated with aberrant nArgBP2 activity or aberrant nArgBP2 expression, and includes but is not limited to, bipolar disorder, schizophrenia and autism.

[0036] A nArgBP2 activity includes, but is not limited to, any naturally occurring biological activity that a nArgBP2 gene product has in vivo. Exemplary nArgBP2 activities include, but are not limited to, interacting with members of the MAGUK (membrane associated guanylate kinase) family (e.g., PSD-95), SAPAP3, the SHANK family, kinases, kinase binding proteins, and others. Additional activities of nArgBP2 include those that nArgBP2 has in modulating the activity of cortico-striatal synapses. For example, an nArgBP2 activity includes, but is not limited to, a change in expression of SAPAP3, a change in SAPAP3 activity, a change in expression of NMDA receptors, a change in activity of NMDA receptors, a change in expression of AMPA receptors, a change in activity of AMPA receptors, a change in p21-activated kinase (PAK) activity, or a change in PAK activity.

[0037] A nArgBP2 disorder can arise from a number of potential genetic defects. Aberrant (reduced or increased) expression of wild type nArgBP2, possibly resulting from a mutation in nArgBP2 gene regulatory sequences, or a mutation in a regulatory protein of nArgBP2 gene expression or protein function is expected to lead to a nArgBP2 disorder. Alternatively, expression of a mutant (i.e. having at least one amino acid change as compared to the control nArgBP2 protein) nArgBP2 protein having impaired function would lead to a nArgBP2 disorder. All animals known to express nArgBP2 (e.g., rodents, canines, felines, equines, and primates, especially humans) can potentially have a nArgBP2 disorder, and can be diagnosed as such by the methods described below.

[0038] A therapeutic agent includes agents which have been shown to ameliorate the symptoms of bipolar disorder in a test subject. A test agent can be tested on a subject with bipolar disorder and then compared to another subject without bipolar disorder or compared to the subject before treatment. Where the test agent ameliorates the anxiety symptoms in the test subject the test agent can be considered a therapeutic agent. A test agent can also be considered a therapeutic agent where increases in the amount of nArgBP2 protein are produced in an individual. These agents may also be enhancers of nArgBP2.

[0039] Test agents or libraries of test agents include natural or synthetic organic compounds, including but not limited to oligomers, non-oligomers, or combinations thereof. Non-oligomers include a wide variety of organic molecules, such as heterocyclics, aromatics, alicyclics, aliphatics, and combinations thereof, comprising steroids, antibiotics, enzyme inhibitors, ligands, hormones, drugs, alkaloids, opioids, benzodiazepenes, terpenes, porphyrins, toxins, catalysts, as well as combinations thereof. Oligomers include peptides (that is, oligopeptides) and proteins, oligonucleotides (the term oligonucleotide is also referred to simply as “nucleotide”, herein) such as DNA and RNA, oligosaccharides, polylipids, polyesters, polyamides, polyurethanes, polyureas, polyethers, poly (phosphorus derivatives) such as phosphates, phosphonates, phosphoramides, phosphonamides, phosphites, phosphinamides, etc., poly (sulfur derivatives) such as sulfones, sulfonates, sulfites, sulfonamides, sulfenamides, etc., where for the phosphorous and sulfur derivatives the indicated heteroatom for the most part will be bonded to C, H, N, O or S, and combinations thereof.

[0040] Methods of identifying therapeutic agents for the treatment of subjects expressing a phenotype associated with a condition such as bipolar disorder, schizophrenia or autism are also provided. Briefly, test agents may be administered to subjects with the condition in which the subject has a disruption in at least one nArgBP2 allele or altered expression or activity of a nArgBP2 polypeptide. The phenotype of the subject is then detected and alterations in the phenotype after administration of the test agent are indicative of therapeutic agents. The alteration of the phenotype may be detected by comparison to a control. Suitable controls include the same subject before administering the test agent, comparison to a control subject lacking a disruption in nArgBP2 or subject without the condition. A test agent may then be identified as a therapeutic agent for the condition if it ameliorates the condition or causes the phenotype to change, e.g. diminish in severity and become more similar to that in a control subject without the condition.

[0041] A variety of subjects are useful in the methods described herein. Generally, subjects are mammals. Suitable subjects include, but are not limited to organisms which are within the orders Carnivora (e.g., dogs and cats), Rodentia (e.g., mice, guinea pigs, and rats), and Primates (e.g., humans, chimpanzees, and monkeys). In some embodiments, the subjects are humans. In other embodiments the subject is a mouse, such as the transgenic KO mouse described herein.

[0042] The phenotypes associated with the conditions include, but are not limited to, the level of activity of the subject, compulsive behavior level of the subject, repetitive behavior of the subject, weight gain of the subject, risk-taking behavior likelihood of the subject, hedonistic behavior by the subject, fearlessness of the subject, irritability of the subject, psychotic behavior of the subject, circadian patter of the subject, and anti-depressant activity of the subject.

[0043] Compounds or test agents produced or identified as therapeutic agents by application of the assay procedures described herein to the test agents are useful in vitro and in vivo as a treatment for bipolar disorder. Subjects that can be treated by the compounds identified by the methods disclosed herein include, but are not limited to, humans and animals (e.g., dogs, cats, horses, cattle) for veterinary purposes.

[0044] As noted above, test agents and therapeutic agents which are active compounds produced or identified by the methods described herein and pharmaceutical formulations of the same (e.g., said compound in a sterile pyrogen-free saline solution), along with the use of such compounds for the preparation of a medicament for the treatment of a nArgBP2 disorder either alone or in combination with other compositions may be used to treat bipolar disorder. The formulations can be used to treat subjects as an active compound or can be used as test agents for the identification of active compounds.

[0045] The test and therapeutic agents described above can be combined with a pharmaceutical carrier in accordance with known techniques to provide a pharmaceutical formulation useful carrying out the methods described above. See e.g., Remington, The Science And Practice of Pharmacy (9th Ed. 1995; Mack Publishing Co., Easton, Pa.). In the manufacture of a pharmaceutical formulation according to the presently disclosed subject matter, the active agent (including the physiologically acceptable salts thereof) is typically admixed with, inter alia, an acceptable carrier. The carrier must, of course, be acceptable in the sense of being compatible with any other ingredients in the formulation and must not be deleterious to the patient. The carrier can be a solid or a liquid, or both, and in some embodiments is formulated with the compound as a unit-dose formulation, for example, a tablet, which can contain from 0.01 or 0.5% to 95% or 99% by weight of the active compound. One or more active agents can be incorporated in the formulations, which can be prepared by any of the well known techniques of pharmacy such as admixing the components, and optionally including one or more accessory ingredients.

[0046] The formulations of the test agents or therapeutic agents include those suitable for oral, rectal, topical, buccal (e.g., sub-lingual), parenteral (e.g., subcutaneous, intramuscular, intradermal, or intravenous), and topical (i.e., both skin and mucosal surfaces). The most suitable route in any given case will depend on the nature and severity of the condition being treated and on the nature of the particular active compound which is being used.

[0047] Formulations suitable for parenteral administration comprise sterile aqueous and non-aqueous injection solutions of the test or therapeutic agents(s), which preparations are in some embodiments isotonic with the blood of the intended recipient. These preparations can contain anti-oxidants, buffers, bacteriostats and solutes which render the formulation isotonic with the blood of the intended recipient. Aqueous and non-aqueous sterile suspensions can include suspending agents and thickening agents. The formulations can be presented in unit-dose or multi-dose containers, for example sealed ampoules and vials, and can be stored in a freeze-dried (lyophilized) condition requiring only the addition of the sterile liquid carrier, for example, saline or water-for-injection immediately prior to use. Extemporaneous injection solutions and suspensions can be prepared from sterile powders, granules, and tablets. For example, in one aspect of an injectable, stable, sterile composition, or a salt thereof is provided in a unit dosage form in a sealed container. The compound or salt is provided in the form of a lyophilizate which is capable of being reconstituted with a suitable pharmaceutically acceptable carrier to form a liquid composition suitable for injection thereof into a subject.

[0048] The unit dosage form typically comprises from about 10 mg to about 10 grams of the compound or salt. When the compound or salt is substantially water-insoluble, a sufficient amount of emulsifying agent which is physiologically acceptable can be employed in sufficient quantity to emulsify the compound or salt in an aqueous carrier.

[0049] Formulations suitable for topical application to the skin can in some embodiments take the form of an ointment, cream, lotion, paste, gel, spray, aerosol, or oil. Carriers which can be used include petroleum jelly, lanoline, polyethylene glycols, alcohols, transdermal enhancers, and combinations of two or more thereof.

[0050] Formulations suitable for transdermal administration can be presented as discrete patches adapted to remain in intimate contact with the epidermis of the recipient for a prolonged period of time. Formulations suitable for transdermal administration can also be delivered by iontophoresis and typically take the form of an optionally buffered aqueous solution of the test or therapeutic agent. Suitable formulations may comprise citrate or bistris buffer (pH 6) or ethanol/water.

[0051] Formulations suitable for oral administration may be presented in discrete units, such as capsules, cachets, lozenges, or tablets, each containing a predetermined amount of the test or therapeutic agent; as a powder or granules; as a solution or a suspension in an aqueous or non-aqueous liquid; or as an oil-in-water or water-in-oil emulsion. Such formulations may be prepared by any suitable method of pharmacy which includes the step of bringing into association the active compound and a suitable carrier (which may contain one or more accessory ingredients as noted above). In general, the formulations are prepared by uniformly and intimately admixing the test or therapeutic agent with a liquid or finely divided solid carrier, or both, and then, if necessary, shaping the resulting mixture. For example, a tablet may be prepared by compressing or molding a powder or granules containing the test or therapeutic agent, optionally with one or more accessory ingredients. Compressed tablets may be prepared by compressing, in a suitable machine, the compound in a free-flowing form, such as a powder or granules optionally mixed with a binder, lubricant, inert diluent, and/or surface active/dispersing agent(s). Molded tablets may be made by molding, in a suitable machine, the powdered compound moistened with an inert liquid binder.

[0052] Methods for assessing the risk of an individual developing a disorder associated with aberrant production of the nArgBP2 protein or polypeptide are disclosed. In this method an individual is evaluated to determine the nArgBP2 genotype or the expression level of nArgBP2. The individual may be a human and may be suspected of having bipolar disorder, schizophrenia or autism. The levels of nArgBP2 expression and the nArgBP2 genotype may be evaluated using a tissue sample, group of cells, single cell or the like obtained from the individual. The cells may then be subjected to a quantitative detection of the amount of nArgBP2 protein in the sample from the individual. Alternatively, the genotype of the nArgBP2 alleles may be evaluated using standard techniques as described in more detail below. The nArgBP2 genotype or the expression level of nArgBp2 polypeptide is then compared with that found in controls. Suitable controls include individuals lacking a disruption in nArgBP2, individuals having normal expression of nArgBP2 and individuals displaying normal phenotypes. A significant or substantial difference in the nArgBP2 genotype or the nArgBP2 polypeptide levels as compared to a healthy control that is not expressing a nArgBP2 associated phenotype is indicative of the risk of developing a clinical disorder.

[0053] Tissues suitable for biopsy in the above-described methods include tissues in which nArgBP2 is normally expressed. Such tissues include, but are not limited to, brain tissue and peripheral nerve tissue. The nArgBP2 genotype may be evaluated in any cell type obtained from the individual.

[0054] The level of nArgBP2 expression in the biopsied tissue or cells can be quantitatively detected by a number of techniques including methods known to those skilled in the art. Techniques which quantitatively detect the protein product include but are not limited to, immunoassays (e.g., ELISA, Western blot analysis, and immunofluorescence). Antibodies which specifically recognize the nArgBP2 protein are known or may be generated by the skilled practitioner. Certain immunoassay-based techniques also provide information regarding the protein product, (e.g., size and subcellular localization) which can also serve as an indicator of aberrant nArgBP2 expression or function.

[0055] Techniques that quantitatively detect the amount of nArgBP2 mRNA are also useful in determining the level of expression of nArgBP2. Such techniques are known to those skilled in the art and may be performed using hybridization-based assays (e.g., RNA or Northern blot analysis, reverse transcriptase polymerase chain reaction (RT-PCR). Such assays may be utilized to determine RNA size and sequence, which can serve as an indicator of aberrant expression or protein function or an aberrant genotype. Other assays can potentially identify a mutant nArgBP2 allele which is expressed at normal levels but is impaired in function.

[0056] One technique for analysis of the nArgBP2 genotype is PCR amplification of one or more regions of the nArgBP2 gene, followed by size analysis of the amplified product. A detectable difference in size of the amplified product, as compared to that from identically amplified wild type gene, is an indication of the presence of a mutation. A mutation which alters the size of the amplified product is likely to alter nArgBP2 expression or function, and should be further analyzed (e.g., by sequencing the amplified region). Some mutations which affect gene expression or protein function might not alter the size of the amplified region, and must be identified by other techniques, such as direct DNA sequencing or restriction fragment length polymorphism analysis (RFLP). Regions that can be targeted for amplification include, but are not limited to, coding regions of the nArgBP2 gene (e.g., exons). As mutations which affect expression and function have also been known to occur in non-coding regions, examination of non-coding regions (e.g., introns, promoters) can also be performed.

[0057] Methods for treating an individual diagnosed with a nArgBP2 disorder by administration of a nArgBP2 enhancer are also disclosed herein. Restoration of a functional nArgBP2 gene in such an individual is expected to have a therapeutic effect. Such restoration can be achieved by administering to the individual a therapeutically effective amount of an enhancer of a nArgBP2 activity to ameliorate the disorder. Enhancers of nArgBP2 include any agent capable of enhancing expression of nArgBP2 and include, but are not limited to small molecules, nucleic acids, proteins and polypeptides. For example, a therapeutically effective amount of nArgBP2 polypeptide can be administered to the individual. Alternatively, the nArgBP2 activity can be increased by introducing an expression construct containing a nucleic acid encoding nArgBP2 operably linked to a promoter into cells of the individual under conditions appropriate for expression.

[0058] Cells of the individual appropriate for targeted introduction of an expression vector are cells known to naturally express the wild type nArgBP2, as discussed above. In the absence of restoring wild type nArgBP2 expression to all such cells in the individual, restoration of wild type nArgBP2 expression in a subset of these cells is expected to provide significant therapeutic benefit. Expression vectors currently known in the art and suitable for use in the above described method include, but are not limited to, adenovirus-based expression vectors, lentivirus-based vectors, adeno-associated virus (AAV) based vectors, and herpesvirus based vectors.

### EXAMPLES

### Example 1

### nArgBP2 is Highly Expressed in Brain Regions Implicated in Bipolar Disorder

[0059] To determine the expression patterns of nArgBP2 expression in the brain, in situ hybridization was performed to detect mRNA expression of nArgBP2 as previously described (Welch et al., 2004, J. Comp. Neurol. 472:24-39). Briefly, mouse sequences encoding the brain specific exon of the nArgBP2 gene (Genbank accession number NM 172752, nucleotide # 1781-2779 of SEQ ID NO: 2) were used as probe. Digoxigenin (DIG)-labeled RNA probes were synthesized with the MAXIscript in vitro RNA synthesis kit (Ambion, Austin, Tex.) using T3 and T7 RNA polymerases. Fresh-frozen brain sections from adult C57BL/6 mice were used.

[0060] For hybridization, sections were fixed with 4% paraformaldehyde (PFA) in phosphate-buffered saline (PBS) solution (150 mM NaCl, 12.1 mM Na₂HPO₄, 2.9 mM KH₂PO₄, pH 7.5) for 10 min at 4° C. and washed 3×3 min with PBS. Sections were then acetylated for 10 min at room temperature in TEA buffer (295 ml H₂O, 4 ml triethanolamine, 0.525 ml 12.1M HCl; mix well and add 0.75 ml acetic anhydride just before use). After washing 3 times with PBS, sections were incubated with hybridization buffer (50% formamide, 5×SSC (750 mM NaCl, 75 mM Na-Citrate), 5×Denhardts solution, 500 μg/ml salmon sperm DNA, 250 μg/ml yeast tRNA) for 2 hrs at room temperature, then with DIG-labeled RNA probes (1-2 mg/ml in hybridization buffer, heat at 70° C. for 10 min to denature, cool on ice) overnight at 70° C. in a chamber humidified with hybridization buffer.

[0061] After hybridization, sections were first rinsed 2×5 min with 5×SSC followed by 4×1 hr with 0.2×SSC at 70° C. Sections were then cooled to room temperature and incubated with blocking buffer (10% normal sheep serum, 0.2% blocking reagent, (Roche)) for 1 hr followed by incubation with alkaline phosphatase-conjugated anti-DIG antibody (1:2000, Roche) overnight at 4° C. Sections were washed (4×10 min) with TBS (150 mM NaCl, 10 mM Tris-HCl, pH 7.5) and incubated with color detection buffer (100 mM NaCl, 50 mM MgCl₂, 0.24 mg/ml levamisole, 100 mM Tris-HCl, pH 9.5) for 5 min. Color reactions were developed in the presence of NBT (nitro blue tetrazolium, 0.35 mg/ml) and BCIP (5-bromo-4-chloro-3-indolyl-phosphate, 0.175 mg/ml) in color detection buffer. Color reactions were terminated by incubating sections in TE buffer (1 mM EDTA, 10 mM Tris-HCl, pH 8.0). Sections were mounted with 0.2 μm filtered 90% glycerol/H₂O for imaging.

[0062] As shown in FIG. 1, nArgBP2 is highly expressed in the cortex, striatum and amygdala (FIG. 1). Dysfunction of these brain regions has been strongly implicated in bipolar disorder as noted above.

### Example 2

### Generation of nArgBP2 Mutant Mice

[0063] To facilitate the study of the in vivo functions of nArgBP2 at synapses, nArgBP2 gene knockout mice were generated. There are two major alternatively spliced isoforms of nArgBP2. The long form, which contains a large brain-specific exon, is only expressed in the brain, whereas the short form is expressed in non-neural tissues. To specifically dissect the function of nArgBP2 in the brain, the brain-specific long form was disrupted by adding a stop codon in the large brain-specific exon (FIG. 2A). nArgBP2 knockout mice were generated using R1 embryonic stem cells following standard protocols (Welch et al, 2007, Nature 448:894-900). Mutant mice were generated using homologous recombination in mouse ES cells. Deletion of the nArgBP2 gene was confirmed by PCR (FIG. 2B), Southern blot analysis of the genomic DNA (FIG. 2C) and by the lack of detectable corresponding proteins by Western blot (FIG. 2D). Mice homozygous for the nArgBP2 mutation were born at the expected Mendelian rate, grew to the adult stage, and were capable of mating. Anatomical and histological analysis showed that nArgBP2 mutant mice are grossly normal, and no gross structural defects were detected in the brain.

### Example 3

### nArgBP2 Mutant Mice Show Mania-Like Behaviors

[0064] To characterize the phenotypes of nArgBP2 mutant mice, detailed behavioral analysis of these mice were performed. Open filed test, elevated zero maze test, dark-light emergence test, and tail suspension test were performed as previously described (Bakeman and Gottman, 1997, Observing Interaction: An Introduction to Sequential Analyses, Cambridge University Press, New York, pp 56-90; Pogorelov et al., 2005, Neuropsychopharmacology 30, 1818-1831; and Weisstaub et al., 2006, Science 313, 536-40). The nArgBP2 mutant mice show hyperactivity in the open field test as measured by their increased vertical activity as well as increased distance traveled (FIG. 3A-B). These mutant mice also show risk-taking behaviors: in the open field test. They explore center areas more than do wild-type mice, while their activity along the perimeter is the same (FIG. 3C-D). In the elevated zero maze test, nArgBP2 mutant mice show reduced latency to enter the open area, spend more time in the open area, and make more transitions to the open area, again indicating risk-taking behaviors (FIG. 3E-G). However, nArgBP2 mutant mice show similar behaviors in the dark-light emergence test, suggesting that the risk-taking behaviors of nArgBP2 KO mice are not due to the altered level of anxiety (FIG. 3H-I). In addition, nArgBP2 mutant mice show reduced immobility time (struggle longer) in tail suspension test (FIG. 3J), suggesting an anti-depression-like behavior, a key feature of manic behavior.

### Example 4

### SAPBP2 Mutant Mice are Fearless

[0065] One of the characteristics of mania and hypomania is disinhibited, fearless behavior. The nArgBP2 mutant mice were tested for fearlessness using the fear conditioning test (Welch et al., 2007, Nature 448:894-900) and also show fearless phenotypes. As shown in FIG. 4, nArgBP2 mutant mice are defective in both contextual and cued fear conditioning. This is consistent with potential defects in the amygdale, since nArgBP2 is highly expressed in the amygdala, which plays a key role in emotion and fear.

### Example 5

### Mania-Like Behaviors in nArgBP2 Mutant Mice are Effectively Treated with Lithium

[0066] To determine whether the mania-like behavior in nArgBP2 mutant mice can be treated with drugs commonly used for treatment of bipolar disorder, the effects of lithium chloride (LiCl) treatment were tested on the abnormal behaviors of nArgBP2 mutant mice. LiCl is one of the most effective and commonly used drugs for bipolar disorder. Both acute and chronic administrations of LiCl were found effective in treating the mania-like behaviors in nArgBP2 mutant mice. As shown in FIG. 5A, LiCl treatment reduces the activity of the nArgBP2 mutant mice to the level of wild-type mice in the open field test. Similarly, treatment with LiCl normalizes the immobility time of the nArgBP2 mutant mice in the tail suspension test (FIG. 5B). These data further support the conclusion that nArgBP2 mutant mice show mania/bipolar-like behaviors, and that these mutant mice are a valuable tool for developing and testing new treatments for bipolar disorder.

### Example 6

### nArgBP2 Mutant Mice are Obese

[0067] In addition to the above described mania/bipolar-like behaviors, nArgBP2 mutant mice are obese. These mice start to gain excessive weight around 3 months of age even with the regular chow (FIG. 6A). Monitoring their daily food consumption revealed that nArgBP2 mutant mice eat more compared to wild-type littermates (FIG. 6B). This is very interesting because it is well documented that bipolar patients have increased risk of obesity and metabolic syndrome, further supporting that nArgBP2 plays an important role in the pathogenesis of bipolar disorder.

### Example 7

### Altered Synaptic Transmission at Cortico-Striatal Synapses in nArgBP2 Mutant Mice

[0068] To survey synaptic defects in nArgBP2 mutant mice, field recordings from cortico-striatal synapses in 21-25 days old mice were obtained. Recordings were obtained in the presence of picrotoxin (GABA_{A} antagonist) to avoid multi-synaptic and contaminating responses from the intra-striatal circuitry. Briefly, 300 μm acute sagittal brain slices from P17-P25 mice were used for all experiments. Recording perfusion solution contained (in mM): 119 NaCl, 2.5 KCl, 1.2 NaH₂PO₄, 26 NaHCO₃, 1 MgCl₂, 2 CaCl₂, and 0.1 picrotoxin (GABA_{A} receptor antagonist). Slicing and recovery solutions were identical to perfusion solution except for containing 0.5 CaCl₂ and no picrotoxin. APV (50 μM) and NBQX (50 μM) were obtained from Tocris (Ellisville, Mo.). Solutions were continuously equilibrated with 95% O₂ and 5% CO₂ (pH 7.4) and perfusion flow rate was 2 ml/min. Slices were allowed to recover for a minimum of 1 hr at 30-32° C. following slicing. All recordings were performed at 30-32° C.

[0069] The field recording electrode was placed in the dorso-lateral striatum and a monopolar stimulation electrode was placed in the corpus callosum. Current was delivered to the stimulating electrode using an A.M.P.I. Stimulus Isolator (A.M.P.I., Israel) for 150 μsec. Three distinct components were resolved in the majority of recordings: stimulation artifact, negative peak 1 (NP1, action potential-derived based on latency, resistance to NBQX and picrotoxin, and sensitivity to tetrodotoxin) and negative peak 2 (NP2, fEPSP based on latency and sensitivity to NBQX; in addition, sensitivity to tetrodotoxin indicates response not due to direct activation by stimulating electrode current). The callosal stimulation site was chosen over an intra-striatal site to minimize activation of non-cortical axons. Data were acquired at 20 kHz and filtered at 2 kHz using MultiClamp 700B amplifier and pClamp 10.0 software (Axon Instruments, Sunnyvale, Calif.). Data were analyzed offline using Clampfit 10.0 (Axon Instruments). Five consecutive responses were averaged prior to measuring amplitude, slope or area in the respective assays. When amplitudes are reported, similar conclusions were obtained by slope analysis. Paired-pulse responses were evoked using a stimulation intensity that yielded the maximal fEPSP response. Slope values used for paired-pulse ratios refer to slope during the period from 20-80% of the peak response. NMDAR fEPSPs were evoked using the same stimulation intensity that yielded the maximal fEPSP response under the basal recording conditions used to generate the input-output curves. The area of NMDAR field potential responses was measured during a standard 20 millisecond time window beginning approximately 8 milliseconds after stimulation. All data were collected and analyzed prior to unblinding of genotypes. In addition, NMDAR field potential recordings and correlative PSD biochemical studies were performed in two different labs and were unblinded at the same time.

[0070] As shown in FIG. 7, total field excitatory postsynaptic potentials (fEPSP) and axonal excitability were not significantly changed in nArgBP2^{-/-} mice in comparison to responses from wild-type littermates (FIGS. 7A, B). NMDAR-mediated responses were monitored by recording in the presence of an AMPAR antagonist (NBQX) and the NMDAR co-factor glycine, and in the absence of magnesium. The NMDAR-dependent fEPSPs were elevated in nArgBP2^{-/-} mice (FIGS. 7C, D), suggesting that nArgBP2 may play an important role in regulating synaptic plasticity. These findings provide a synaptic mechanism as well as a potential therapeutic target for mania-like behaviors.

### Example 8

### Altered Synaptic NMDA and AMPA Receptor Compositions in nArgBP2 Mutant Mice

[0071] Because nArgBP2 is enriched in the postsynaptic density (PSD) and because electrophysilogical studies indicate an altered synaptic transmission, we investigated whether the composition of synaptic glutamate receptors, which is critical for synaptic transmission, is altered in nArgBP2 mutant mice. Using biochemically purified PSD preparations from adult wild-type (WT) and nArgBP2 mutant (KO) mice, the abundance of various postsynaptic proteins in the PSD was determined by quantitative Western blot analysis (FIG. 8). PSD fractions of the striatum were prepared as described (Welch et al., 2004, J. Comp. Neurol. 472:24-39), separated on SDS-PAGE and probed with specific antibodies. The relative amount of β-tubulin and β-actin were used as loading controls for quantification.

[0072] A significant increase of synaptic NMDA receptor subunit NR1, NR2A and NR2B were found in mutant mice, supporting the electrophysiological findings. In addition, a striking increase in synaptic AMPA receptor subunit GluR1 and GluR2 was found. These data indicate that synaptic transmission in adult nArgBP2 mutant mice is significantly increased, which could obviously explain the manic-like behavior and serve as a target for developing more effective treatment. In addition, over-activation of certain synaptic connections could lead to suppression of neuronal activity in other regions of the brain and lead to depression phenotypes.

### Example 9

### Altered Circadian Activity in nArgBP2 Mutant Mice

[0073] Ten wild-type and ten mutant mice were each individually housed in a cage equipped with a running wheel and kept within ventilated, light-tight chambers with timer-controlled lighting. Activity was recorded on a computer with the software ClockLab (ActiMetrics Software, Coulbourn Instruments, PA) and analyzed using MatLab (MathWorks, MA) and ClockLab Analysis (ActiMetrics Software, Coulbourn Instruments, PA). Mice were kept in an automated light-dark cycle of 12 hours (LD12:12) for 2 weeks before being switched to a dark-dark cycle (DD) for 3 weeks. When switching to DD, the lights went out at regular circadian time, but did not come on the following day.

[0074] As shown in FIG. 9, when mice were switched to dark-dark cycle (arrows in FIGS. 9C and D) their activity pattern reveals their intrinsic circadian rhythm. FIGS. 9C and D show activity traces of individual mice and demonstrate the dramatically shortened circadian rhythm in nArgBP2 mutant mice as compared to wild-type control mice. FIGS. 9A and B show that nArgBP2 mutant mice have significantly shortened circadian rhythm as compared to wild-type control mice. Because bipolar patients often have circadian rhythm defects, this finding further supports that nArgBP2 plays a role in bipolar disorder.

We claim:

1. A transgenic non-human mammal comprising a disruption in at least one allele of nArgBP2.

2. The transgenic non-human mammal of claim 1, wherein the transgenic non-human mammal is a mouse.

3. The transgenic non-human mammal of claim 1, wherein the disruption comprises a deletion of a portion of nArgBP2 or an insertion into nArgBP2.

4. The transgenic non-human mammal of claim 1, wherein the disruption is in the neuron specific exon of nArgBP2.

5. The transgenic non-human mammal of claim 1, wherein the neuronal cells of the transgenic non-human mammal exhibit reduced expression of a functional nArgBP2 protein.

6. The transgenic non-human mammal of claim 1, wherein the transgenic non-human mammal comprises a disruption of both alleles of nArgBP2.

7. The transgenic non-human mammal of claim 1, wherein the mammal has a phenotype distinct from that of a non-human mammal of the same species lacking a disruption in an allele of endogenous nArgBP2.

8. The transgenic non-human mammal of claim 7, wherein the phenotype includes at least one of increased activity, compulsive behavior, risk-taking behavior, hedonistic behavior, obesity, fearless behavior, psychosis, repetitive behavior, irritable behavior, altered circadian pattern and anti-depressant-like behavior.

9. A neuronal cell comprising a disruption in at least one allele of nArgBP2.

10. The neuronal cell of claim 9, wherein the cell is from a transgenic non-human mammal comprising a disruption in at least one allele of nArgBP2.

11. A method of identifying a therapeutic agent for the treatment of a disorder, the method comprising:
(a) evaluating the level of a nArgBP2 activity or nArgBP2 expression in a cell after contacting the cell with a test agent, wherein the contacted cell has at least one of altered nArgBP2 expression, nArgBP2 activity, SAPAP3 expression, SAPAP3 activity, NMDA receptor expression, NMDA receptor activity, AMPA receptor expression, AMPA receptor activity, p21-activated kinase (PAK) activity, or PAK activity; and
(b) detecting a change in the level of a nArgBP2 activity or nArgBP2 expression in the cell, wherein a change in the level of a nArgBP2 activity or nArgBP2 expression in the cell indicates that the test agent may be a therapeutic agent effective for treating the disorder.

12. The method of claim 11, wherein the cell is present within a transgenic non-human mammal.

13. The method of claim 11, wherein the cell is a neuronal cell or a neuronal cell comprising a disruption in at least one allele of nArgBP2.

14. The method of claim 11, wherein the disorder is selected from the group consisting of bipolar disorder, schizophrenia, and autism.

15. A method of identifying a therapeutic agent for treatment of a condition comprising:
(a) administering a test agent to a subject comprising a disruption of at least one nArgBP2 allele or having altered nArgBP2 expression or nArgBP2 activity, wherein the subject expresses a phenotype associated with the condition; and
(b) detecting a change in the phenotype in the subject, wherein a change in the phenotype is indicative of the ability of the agent to treat the condition.

16. The method of claim 15, wherein the subject is the transgenic non-human mammal comprising a disruption in at least one allele of nArgBP2.

17. The method of claim 15, wherein the phenotype includes at least one of the subject's activity level, level of compulsive behavior, repetitive behavior, weight gain, risk-taking behavior, hedonistic behavior, fearlessness, irritability, circadian pattern and anti-depressant activity.

18. A method of assessing a risk of an individual of developing a disorder associated with a disruption of nArgBP2 comprising:
(a) evaluating the nArgBP2 genotype or the expression of nArgBP2 in the individual; and
(b) detecting an aberrant nArgBP2 genotype or altered level of expression of nArgBP2 in the individual, wherein an aberrant nArgBP2 genotype or altered level of expression of nArgBP2 is indicative of the risk of developing a disorder.

19. The method of claim 18, wherein the individual is suspected of having bipolar disorder.

20. The method of claim 18, wherein the expression of nArgBP2 is evaluated in a sample from the individual and the sample is selected from the group consisting of a cell, a tissue, and a fluid expected to comprise a nArgBP2 polypeptide.

21. The method of claim 18, wherein the expression of nArgBP2 is evaluated in a sample from the individual by obtaining nucleic acids.

22. A method of treating an individual with a disorder associated with reduced nArgBP2 activity comprising administering an effective amount of an enhancer of a nArgBP2 activity to the individual to treat the disorder.

23. The method of claim 22, wherein administering comprises delivering an expression construct encoding a nArgBP2 polypeptide operably linked to a promoter to the individual.

24. The method of claim 22, wherein the enhancer comprises a nArgBP2 polypeptide.

The application's sequence listing, which the Patent Office published only in electronic form, follows.

SEQUENCE LISTING (5 sequences)

SEQ ID NO: 1 - DNA, 321310 bp, Mus musculus
agttcttttatcgtagatttttatgtttttttatatcagtactttgtaaaataaatgatattgtaaagacctttcatgtaagcgattcataacacattcttgagatgacttctgtgcggttatccaactgcatctcctggcatttttaataaccttcttaatatttcctgtcatccccatctgttcggatttaaggttgattatccagacaagctgtgctactaagagccacctgatcacttcagtgcatgccatgcaggtgttagcctcgtgacgttttcagggaggaaacataaaaccgcccctgctacattatactcacatctcccaggtaggtagattacccagaacactgggaaattaagcgtagacacaattatagagaatcacatcactggtcctttaaactcgctcaacttaacctggcacagattccctaatgggcaattctctgactgtatccctaggggaaatattgagcgtaggcaaaggttaaggcagaggagtgcgctgagacgaagaggcagccaatcagatgaagagggtctaaagatccaacgcctgcaggcgagcagcaccaaacccagctgcttagcctccttcagttgcggatgaacaacgcatagacgtttgttgcaaaggcttcttagccagcgagcagcacccccgtatctaagaagagagggatagatgcccaagcaactcattctgcatagcagctgccacgacaaccctccttgtgctggaatgtgctcacttgaaggtactggttcttttacattaagcccctatgattttaaagaaagaagcagagaaggctggtgctggggagactttctgctttctagtaatgctttgttccttccttctctggctaatccctgctttaaaatgcttaacctctggctgaggctatgctaggcacgataaaagggacactttccattgcctaagcggactgcacagcccctttattaggacagcctctttgttaatgttgctattgttctcaaggtaagctggttaataacgctgccttcaaccctcgcatcctgctacattcataactaagaatacaggacaggaaggatgagactccgtgtcttcaaggttgttgcaatttctctaattatctaccagtctgagagacaaaaagctccaaacaacagctgatcaaacgtagagaaagaatttggctcataattggattcctctgtgcttaggatgcaatgcgaggtttatttaaaaaaaaaaaaaggcatacacacatacacacacacaccccaccaccaccaccactagcaacaacaataacaacaaaacacttttcaatcccgcttaataattaagatgccttaattatcatctattactgagagttagtgcaaccatttaaaagtcagcagcatgtgagggggcccttgttttagttgccaaggtaattggaaggataattcaatatgctccagagtaacaaaagacccctgagaaacatgcattagatgaggcacggagttgcttcatggggtgtttatttctctgagtgtgtcctcttttttttgtctcttgtcccatcagtatgttagcagaaataggtaacacggggacttgcagggtgtctcctgtacttacacgtgcatggctatttatcttatatgttacataggacataatggatgcctaggatgtgaaattgtggattgaatggaagctctcactggttaagctctgtgatagcctctgtgggacatctgaagtcatgtatcagccggttgtgaatggtggcccgagagagaataggatctgtgtttgcagagaatgggcacagatgcctggcatgctatgctgcttttggagttgtctctaaaagagcatggcacacggaaaatgtagtcttcatagcaaatggacagggctgaccttttttggagaagcgataacatctttgtagagttaatttttaaaggtcttttctttttttagatgttaaagcattggtagagtttctgaatttccaaacccagtggtattttattactttttattcctttttcacatgtattcgctttatacgttttattcattcagttattcactactgtctgtggaactaagtatacttaactgtgtaaagttatcagttgcattactatgacagtctttggcattttgggttaccctattcaaatgtgaatgattctacttaccaagtgtgacaatcaagtcaagctagtatttagcgctaacattcttcttataaaaatcattgcttaataatcaatagtcatatgactagtgatagaactgtacagatttaaactcttaatttgtaatattaaaaataagctgtaaagtaaaataagattatttttcctatgtgggaaaatattatttcttactacctttaaagggcattgcttttgagaaggcaaagtaaagaattaactggctgcccacaaggagtccactaacaactttgatgaatggcaaggggacctggcatctggtagcacatgggatcccaggaggtcagcatcccgaacttggctctgagtaatgctgtacgtgggatgatggcataagtctgtttttgctaatggaaaagaaaagcaggaagtgatcctagagagataaaggaacaaggcatcctaagaggcattcaaagagaaaaaacttgaggtatagccttgacaaccgaaagtcccacttcctggttaacctgggggagaggaggggggagcagactgactttatggcttatgagaattataaaaagcccatataagaatacatagttcttgtaaataaaatgagggcattgttatgaggacattggagcaggttgacattcattcattggcactgaaacagatccttccttggaggacccttgtacttccccttctgtgttagagtgggagaggtggtcttctccaggaagagtcccctaattgctcatgcaatgctaagcagtcagctatgagaccatgtagatacatatgggaaacagtgtacagagtgagtaggttacatttatatatttaggagtctgtgcatctgtctatatgtataaaaaaaagaggttatgagtttgagagagatggggctgggtgcatgggaggggactgagggagggaagagtgtgaaaggaggaaatggtctaattatattacaatttcaaaaaaaatggctatagaaatttctcctttagaagaggaactcagtccagtggagactttagagaggtctgtagtgtctctttacctgtcctcactgctctgccccgcccccaaattctcttacacctctcatttaacatcagacttctacctgcagagagcattactttcagcatggtgctcttgaatcctatttaaatgcaaattgcctcagaaagaaggcaataagctgttattacctggctgtgttttgtaaggacctgagagaggtcccctactagacattgctgagtagatgacagagttctaagaagaaacaatgagaataccagggagaaagaatacaaaagagaaaagctacccaaaggacagggtgtggaaaacatatcctatgatgcccagacaacaatccataactacaaaggaagttgggttgcaggtccaaaataacatcaaccccccaggtaggtagcaatgtcagagagaagcatgagatacatggtttttggtttggtttgttcttcctcttggtcacctgtaaggataccgccttaagcagtcacttttatgacatttgtagcaggaactgattacaggcccaagggaagtgaacctcagtttaagagacaaagtaaaagtttccttttgttcttatactaacttttgtcaaagggcatgcaaggggacaccattaagaatgatgtctgtgcaaattagctttggtcctgtgtaagccagactccaagtacaacagagagcaatatggccccacagcaagagtgaccttccatctcgggtatctcaccattgctccattttcaaggttactcttgtatatctctttgatcatgtccaacttcatgataattctgcttagtccggcatctctgagagtgatctgatttagagaagtccctattagaattgacatgtgaaatctctaatctcactgcaatgcaaaggactctatacaggaacaccacaaaaagctatgtaagctttttctcgtctagtatttatgacagtatgctgacttagttttgtaaactttatttccttaccatattggagttcttccgaggaagaactttcaaatctaccactgtgacttaggacatactccattttattgaaggcattaataccattcctttctcgagatgtgcattgctgtattaacactgaattaccacttagcaaagttacatgaaagataaagtgaccccacaataaaatatggagccagatataatggtgtatctccattatcccagtgctcagagagtggaggatcactcacacaaggccagcttggataacatatagaaactcagaaagaaaatttaaatctgtaagtcaaaaaaagttattttgcttcaatagcacttacccaccctaggtcactatgccctggcatcctcatggtctcacaagtgccagagaattgagctgacccctaaacatttctgataaatgaatgcacagtgatctagttaagtactaggtcaatctcatctgtgtaaaggttaaatccagaatgtgcattggtggaaaggatctctaagaccaggtcaaagggataccagaaatgtcttccacctcctggaaggtggaaattagcttttaacactagtggagagaacagactgcggcattagctgagcaataggttggatctctagagtcagatgaagggcttccaccatgaaccatggtgatcaactctattcaataccagagaacatataaaggtatgtccaagctttcaatgagcagtccctttccagtctcttacaacttgaactctctacttgtgtctcctcctggcatctttgtatggactgtggaccaaaccaaatgcatgttcactgtaatatgtccaaagggaacgtgatgcacatacctgttgacaaccagccagttataaaatccctttcgggcaggtaatggaaaacaacgaggctcttttcttggactgctaccaaagtttgccttgttttgtttaggatgatgtcagtgtggatcatttgaagataaaatctaggtttatgacccaggagtctaagattcctcccttctctcccagatttaaatgctttcaatgcttttcttcccagcagacacaaaggaaacctctcagtgcattcatttggtgaatgttcagcttctttgtagaccatctgggactgtgttccatttgtatttagttcagagacacccacattccccttttactcagcaccatagaacagagatagtcacttgctgttgacacaagtcatagtacaggatctcaagtgtccctcaaaagcctatttgatctagtcctagaggaaacaattagattatgttgggaaagaagaccctcaatgagtatatatatatatatatatatgttctcttgcagacttgggaagcagtcttggctctgatgaatgaaatgaagttaggttgagagtatgttatggttttgtcaaaggaggtagaaggagaggcaagagtgattgactgaagtctatttcagtacaggatgaagacacaaggcaacatttttataagttactttgaagagactactgagtccattcaaatatttacctagtgcttgaatgagctcaacagtgtagcaaaaaattgttaaaaggccctcagggagagaggccaataatgatttttgaaaatgttttccaggaggtggaagacatttttggtatccctttgacctggtcttagcaatcctttccaccaatgaatattctggatttggcctttacacagatgagattgatgtagttatatatatatagaaagtattgggactaggggattggcccgtttataaacacaggtatgaacacctgatttccaccaacacacacacacacacacacacacacacacacacacacacacacacgtgcacagcttgttaggaagggaaatgcttgttgtaaacctaacactgagaagtggaaacaggaggattcttggatctcactggctagttgaatttgaaaccccaggccaatgacagacattgtctcagaaaacaagatggtcatctctgaaagcatgacacctaaggatggtctctaacctctgtgcatacacagaaagacatacacaaagacacatcacatcacacatacacacacaaacttacatacatatacacacaacgcccaatagagatttctatttaacctggctcctttttcaaaaatcgttactgcctctccccctgagggccttttaacaattttttgctacactgttgagctcattcaagcactaggtaaatatttgaatgaactcagtagtctcttcaaagtaacttataaaaatgttgccttgtgatcttcatcctgtactgaaatagacttcagtcaatcactcttgcctctccttctacctcctttgacaaaactgtaacatgccctcaacctatttaatttcattcatcggagccaagactgcttcccaagtctgcatcaaaatagaccctacaaaccttattcttaaagtattcttaacagaaccgattgcactttgtaggacaatgtcttcatccttccttcccctctccagtcatcacagggcacgtcggaccatggtttcacgagaagaaaatgtcattgagcattttgataatgttgacttcatcagttaaattcccaaagttgtctcaaatccagggttttctttgaagttcctattgtctttgtttagacctcacactcttctgatgactactgtttttattactttttaaaaatggttttagagctttattgtagagaggcagggcgaaaggagagaaggtggaaggagagagagagagggagagagagagagagagagagagagagagagagagagagagagagagagagagagagagagagaccggctgtggccaaaggaaacaaaggggaaagctttttttatcacttttcaaacatggaatttttgtatagcctagatagccttgaatttactatgtattccaggctggccatgaactcaaagcagtctgttgagtgtagcttttgctaccctgtccaagctcctggaacaaaccatgctaccaaaccctgctcatagaatattggatctgcaggtggaaatgcagacatgcacagatgttcaacttcaacttgcctttttggcacaattgttggacgctacttctcttctgcctggagaagcatgcccttatcaatattcttatctctgcacctgtccacctgccaactttagttgctcagttacatctagtcccagttaaacttccccaactgcccacctgtaggaaccctctgggatcactctgtccaatatctcacatggatggtcatcttttctcccccagaagcaccatgaactctcctccttgtgtctggggacccagaaggcacacctattccttccacccagcaattggcctacagtttctttactgatagatcaagagccaatcagggaacaggaccttagcatctgaactatccctacagcagacttcattcctatgcattaggactacagatatatacctagcagtggtattctttataactgaagagaacccgtctcacctatggcaataccatgtatcagataaagaagttccatgttacctaattaaatattggaaattattatgtattgccctagggttttattaaaatgaaagacatcatgactatggcaaatcttatgaaggacaacatttaattccatctggcttatagtttctgacttttagtccattatcatcatggtgggaaacatggtagcatgcaggcaaacatgataccagagatggagtaaagagttctacattttgatccacaggcagcaaggagagagagtgtgccacactgagcatatcttgagcataagagacttcaaagcccacccccacagtgacacacctcccctaacaaggccacacctcccttaacaaggccacaccttctaatagtgcccctgtctatgggccaagcgttcaacacatgagtctattgggggcaaaagtattcaaatcaccacatgtatgtaccacagtgtactacccatcttctctactatatctggaactattagagagtagagaagcatagtagtcataaatggaataacagatgaagaacaagtaagctaattaatgacaaagacagaggggtctgactaatgcatattaaccacatgacactgtttctcagtattgaaaataatttaaggagagaataaggcccatgaactgtaaaaaagaatgtcttgtaagcaaagcaaaacagaggtgttgggagaagaccttaaaaactataagctctaatggaaactgaacaaattcagataaatattgatagtctgatgagagacatagtataacagagaagccacatttgagaattcatgtaggaagagtattgaaggtgtcaagcagaggttttatttcgccaagaatcatcttaggcaacttagatagaaatgaaccagttacaaagtcgacgtgcatggggcctgggcaagtctgcctcagatcctctgggtatatagtatggcttccagtttactgttttatgggttccctgagtgtgcaaacagtgactctctgattcttgtgtcttctcttgggctctttttcttctgttggtttttcttaatggttcctaatttgacatgacagttttgttttaacttgctacattttattttgttgtagttttgaatgaatgaatgaacgaatgaatgaatgcttagccactgggtaaaggttaacaaatgaaccaccactcatgcctgctgggagaggaaaaaaaaatcagttttcttcaataggtaggtgctagttatatcaaccacaccagagcaggcctcatattcaatattatttaaacaacatataattggactccacatgttttgtttggttttgattgtgtgtgtgtgtgtgtgtgtgtgtgtgtgtgtgctttatttggttacagtttggtgatttttttttctctttgttttaaagaattggttttatttagtttttatggtcttgtaggttgtgctgttgttttggacttttaaaatttgggtgggtaagtaggggaagaggatctgaaggacttgggggaggagaagaatataatcaaaatatatttgtgttttaaaatgtttttatttatttgtttaatgtatatgagtacactgtaactgtcttcagacataccagtacagggcatcagataatattacagatggttgtgagccaccatctggttgctgggaattggactcagaacctctggaattgtagtcagtgctcctaaccattgatccatctctccagcccttaaaattggttttaatagtgaaaactatattgatgatgatggtggtggtgatgatgatgacataagaggaagagaaaggaaccattcacatttaaattaacaattttgtctttacctaaaacttgatctgtgttgggccatgttctaagcatatcacataagtgggcttaattaaacttttaaaaactcaaaatattgggagaggggttgtaaatcccattttgtagatgagtcagcagaaatgcttgggcttctttcagaccatgtaattggaacctagaagacatggtgaatattgtttatatctttcaccactctgttgaggtttgcctgtctagcctgggctaccgtttacagttgaatgtgttactttggtagaggaagcctgatgtcatccccagagtttgacactagaggtaaattaagaaattaaaaagtaaagaaaattaagaaagtagaataaagaactaagtgaattaagaactgtgaggtttccttacctgcggccaggattccagtgtgtcccattactacagcaggggagtctctgagcttattgacatctaactatgtgcttaggctgcatttttcaggagaggggaaaagacagaagaattcaaaaaagttgcaaaagaaaaagctataaacactaaggctgtgacccttaccctttgtccagatacttaccctgactctatggcatttaaatgttgggatgccacgttataagctatcagtctgctcaacgtccagggagaagcttctgaagatgtttttttttttaattcaaaactagttatttttaaaaaatgcttttatttgaaatagaattatatcacttctgcccttcctttcttcccccaacccctcccagttaacttcctcaagcccctcccatttcccccagcctcaagttgagaatcccctttcctttaactatatgaattacatacatacacacacatgcacactcatacatgcatctacacacacatacacacacacacatacacataaaacctgctgagtctgattttgagtctgattttttgtttgtgcgtatatggtttcaaagttgactactctgcattggacaaacatgcagttattgataaaagattttttttttgtactttgcacaatccagcaggctatacttttgtattttatataattagagtaaatgtttcatccatttcatgaggtagaatgctaactgaaacttttcttggtattctgcatttaaaaagcctgtgctataatccatgtccatatgataaaattgtgttaacatgtacccagtgaatttaaatcattgacactttttgaaagaatgagtgtatcatttaataaaacatctagtgggaagagagatgcaagattcatctatctctttctttgtttttatttatattatagtccctttgctgacattttgatcagaaagccatctaccaaattgaaatgtgttggaagataactgtcccagcaataccatatattgattcttctgtacttcatatccatatctcactaggttttcaaattgtataccttgcatattttcagattctttcagacaacaacatttagaaaaataatatgtgtgggcatattgttgttctcagcccattttcccctctgtatcgattcacagattcgatgcctgtttttgattggagactagacacaatctagttgaggaattgcccccatcattgtacccttgttctatgttccacacattttgaactacttgagctgtcaaacatttcctatgccaagttcttctaaagggtgttgcttcatggtgaaacataaccttctctatccctccatcaggcccttcactttggtctctaacacttcctgcaatcaggatttacacagttgtttcatcgccacgattcatttacaacattatttatccattccccttttaacctactaaacagatgttatttcttgtagcttgaacagacactgtttgcatatttagaagaatgactcctacgtggggaagcttgcggcctcactcctgaaggtccctttccataatggcagacttcactggtaccacgtatagcttttgctggggagggttttaactatgaggcttgtctacattgaatgctggaagaatccgaagagcatctctggatacacctgctctgggtgtgttgaagtggtggtctgtgagtgaagtcattctcctagaaacaccacaaaaaccactctgggcttgagaggcaaggagagtgagagaggaaacactgaggcctgagaggcatctggtgcctgccatacactgtcagcttctctctgggacctctgagtggatagtcgggatctaaacaactgttggaaagcaagggaagattgttttgataaaagcagcgaaaagtagcatctaggctccaagctgtagaggacacaaactagaaactcagtgcacagtgcaggggatgcagaaggaagtcttctgacaaggaccaggcccagaggaaccaagttacctagaggcaggagagacccaagctacctaagtcggttccacgaatttgaacatcgtggtaatcactctcaccaagtgttaaattcaaacatttactttagagaaagtacaaatgcaaattaactgctcactgatctgtctcttgtcctgattattaaatataaatatttctgttcatcatttggggagtctgacacctgttttagtcactattgtatcactgtgaccaaaatacttagattgaacaatatggggagagggaactttattttgactcaaacttacagaggtttggaggccatcagggtggtagcatcatggtgtcagaggcatgtagcagatgctattgacatagagacagacgggaagcagacagcacggctagaactggggtctaaattaaaaccttcaagctcccacccaaacagctcacaagttctaagagtttcagaggttcccaacacagctacctaccaagggaacatgtattcaaaacaggatcctgggagagactcttcgtattaaaaccagacagttcctcctattgtttttcattgcatacccagaaacacactgagcagtgcaaagagctgtgaccttccccagtaagtctctctgacaacatgaaccagtttgcatcacaatggaagacctccgatgaaaacaaacattatcttctctcctgtctatattaccaatacactaagggcgagaaccacaggtgcaatggttctgaacacaggaagggctgggagtggtggctaaggcctgccatcctagcattctgaacacacaggttaagaagagtgccccaaaataaaggcaagcctgtaatacagaataagaccccaactcaaaaacaacacaacaaaccagtcatcaagcagtcccaacttgccaaacaacaaaccaacaaacaataagaaagatagaaattgttgtatttaagagatacaggcatcagaatagaacaatccacataggttcatatagatatgttagatgtggccttgttgaaggaagtgtgtcacttgggagtgggctttgaagtttcaaaaaagtctatgtcaggcccattctctctctctctctctctctctctctctctctctctctctctctctctctttgtggatcaagatggagctttcagccacttctccagcatcataacgacattccaccatgctctctgtcatgatgataatagcttcagcaagcccccagctgaatgcttcctattacgtaagttgacttggccatgctgtctattcacagcagtagaacagtggctaagacatggccctttccagggtatcaagagttggatctccagcacacacatggcagcttacaactctctgtaactccagttccaggggacttgacaccctttatgtgtaccacatgcacaaactgcacatgcatacatgcaatcaagacacccatttaatccacataaagcaaaattttaaaaaataaaatatgaaatggagggatgatgtaaggggaaattccacactatttaaagaagagattaaaaaaaaaaaacttgcttgagtaggtatagagttctttctttccaaagattttccacaaattctcttttcctgttagcatcgcaattaatgtcatatgaaaattctggagataaaacttgaatttttgcattggttagtttatctgagtcttatttttattttctgtgtaaatatataactagaaaattctaacttcctaaaagttgtttcttctagaacttctctgtggctctatagacctaaaatatattatgtagaatttgaggcataggtagaaacatggtattattgttcaagtatcgatggaagcattaggaggggaagccagacctgagaaagagtgtgggctaaattagagacagagaacagagtgtctcagagtcatgaaatgagaagtgggctctctttaaaaaacaagaatcctgagacatggggctgggaaggcattcagaattgttcattatttgagggttttttggttttttatatatatatacctaacatgtctagacatagaggttagaagagggataaacaagagcaacacatgcactctcctcatagagattatatagtagagggaaaagacaaataacatataggaaaaatataatttcatggccctataatagaagggtgaaaggagccagacagtctggattcaaatcacagccctccatcctgacccagaaaaagacttcaccttcttatgccccggcatatctgtgtaacacagaaaataggacctccctcttacggttgttgatgtgtgaagattgatgagaatagcccctgtaaaaactttaaacagtgtgtgatgcatttaagtctgaaataaatgttagcctttgccatgctgatcggtgaagggtgataataaagcatccacgcacggcttcctgctccggtccaattaacatctgtggtgtccagataaatcttccccataaaagagatgctctgtgcatcataaagtatttagcagtgcctttggcctccactcactagtgctagacacacttcctggtaatgataaccctacatgactctaaccttgtgtaaagatccctgggaggcaaaaatctctcctggctgaaaaccgctgagttagacagtaaacagctgcagcgccttagagttctgaaaaaaataaaaaaataaaaaaacctttgaagagacacagggagggaaccttgggtggtgaacaggaaggaagcattcacgtacagccatgggcgattcagcagagagaacagcaaggataaagaccagagcaggaacagatttgtgccccagcttgaactagagtgaagacaatggtgaagaagtacccagagatcagagtagaaaaatcagaaatgtaaggggtgggggagagggaggcaggggcagctcatttgcctagcatccatgaagcacaattctacacactgcaaattgggtgtggttgtgtatgactgtaatctccatctgcactcagatggtagacacaagaggatctaaagttaaagggatagtcttggttacattgcttgaggctagcctgggttccatgagatcttgtccaaaacaaacacacaacacggtaataaatttgcattttattggttctgtactgaaaagctattacgaggttttaagcgggagagtgatacatttgcttttggggttagttatttgattataaaacatggaagtgtaaaaaaatatgcaatcaaagaggccatggagaatgcaaaggcccagcccagtgaaggatgattgggcttgggtagagctcaaaaggtcatggctgtgaatgtggagagatggaatggaattctaatgtactgtggtagaagaagctgtagacgagaggaagcccaacatgctaatggtataaaagcatgactttcaaggttaataattctgtagaggcaaacatcagtatttctgtttaggtgctggctcacttgagtctcttctagttatgcaagaggtaaggtagccattgattgtaccttctgaagatgaactgagaagttgggactagagatgtgcatttggaagctattgtctttatacaccatttgcaccacggtgccatttgaggtcaccaaaggagagggtagggtgatagtccaagaaccagtgtgaaagtcaccccacttcctgtcgagagggagactgagaaaactgacaatgacatgcagagagtctgtgatggcctagaaacaattacttccaaaagaaacatttgttcatctaggtcaaaagtcactgaaaggtcaagtaaggacaggggattccatgtatgtttggattgggtgaggtagagtgtgctggtggctgctattgaggcatagtttcactggaatgaagaaaatgcaggcctcgatggagtgtatgtatagggaagggaggtagtgaagttgaaaaagaaaatataatctcttcttaagaggaacaattagagggtgatgtaagccaagaaagtcatgtgagaccattggtactgtgggaaattacggcttgtttgagtgaagatgctcgtggttcgagagcctgtagttctttctgtgaccgaactcggtgaaatggaagaaactgatcatccgggagatatgtcaatagctgcatgggacattgattgggtaatagaacgagcagactatgaagcaggccgtaggtcagtttgccttgtagagagattaaatgaataaaatggcaggaaagaaaaatttagataaagagtatatttagtaaataaggtaaagtaaaaatttccatagtatttctattttcttacaaagcaaactgtcaaacaaaaccaactcaagggctgcctgcggccagagagccaaagatgaaggattatagataaaaaaggaatcacatgtcagtggcaggtggaggggaacatggatgtttaataaggggttgaagagatagttcagtggttgaaagtactggctgttctttcagaagacccaggttcaattcccagcacctacatgatgaatcacgactatttattctcatgccaagaaacttgatttcctcttgtggcttgcaagcacatagtgtgcagaattaagtgcagggaaaaaaacatcatatgcatacaaataaataaataactttacaaagaatgtttatcaaaaaatctgttagattggccaagtaacgtgaaatctacttgtaattcataagtgtttattcaactgagctctttcagaaagtcctcatgcttttaggtcgtctttatgcctcaaagtaaacagagagccaggctagtagacaaaatgacagggaaggattagcggaaggcaaggagatattgaaggcagggctgcaccagggttatagaatccaagtggctggatagaaaagtagttcctgaagggctaggctgatgtgcactggtggtacactggagtactcagccaaattagaagcagttggacagaaagtgttagaatattggacagaaagtgttagaataccttgcctaagaaaaaaacaatcagagtggattcttatagggattttagatatggccaagggtgtcgtaataatggcaaggtatagagaccaggtcaaaatgtttgaggtcatcatagaacttggagttcaggcacacaatttgagcattgaggtagaatgaggattgaggagagagaggaatttgcacacacacacacacacgcacacacacacacacacacacacacacacacacagaatcagaatggcaaaattcctaggttttcaggactcagctatgacatgttagccatttctagcacctatgatgtggcaggcattgagagtatctgaacaggagtactgtggtgagtacattctctagaaaaaaatgacactgagaactgaagaggctatgggccagctcagaaggcatgactaatcttccagttgccctgtaaagaaaagattacgtgacggagtagaccaacactaccaagacctgttgtgtgtcattttgaaaacatactggctccttcgtccaggacctcagactgggtttccaacttagcaccgagatcggatcagctgccccagcctcacttccaatttacccatttttcctggctagctccagctagctttgccaagccaccaccctggctgctttctttctcctgcccaccttaggtccatggaaggaaaacattagccagctttattaatttcaaacttgccagatcacataaatactggctgaagaatctcctgccctaacctagcagcccagctagcctacttcaaccacctactggtggtgagggggcagggacatttccagccagccaagatctttttttcttttccttttattggatattttcttcatttcaaatgttatcctctttccaggtctcccctccgggaacctctaatcccctccccctccccctgtctctatgagggtgttcacccacccactcctgccttcccgccctggcattcccctaccctgaggcatggaaccccctcaggcccaagagcctcttctcccactgatgtccaacaaggccatcctctgccacatatgtggccagagccatgggttcctccatgtgtgctctttggttggtggtcatgtccccaggagttccagggatctggccagttgacactgttgctccttccacgggtctgcaaacctcctcagctccttcagttccttctctaactccttcactggggatccagtactcaatccaatggtaggtttcaagcatcagcctctatatttgtcaggctctggcagagactctcaggagacagctatttcaggctcctgtcatcaagcacttcccagcatccacaatagtgcccgggtttggtaactgtatatgggatggattccccaggtggggcagtttctggatggcttttccttcagtctctgctccacacattgtctccatatttcctcctgtgggtattttgttttcccttctaagaagcactgaagcatccgcactttggtgtgaccttcttctcaggtttcatatggtctgagaattgtatcttggatattccaagcttttgggctaatacccacttatcagtgagtgcataccatatgtgtgtgttcttttatgattgggttacctcactcaagatgatattttctagttccatccacttgcctgcaaattccatgaagtcattgtttttaatagctgagtagtattccatcatgtaaatgtaccacgttttctatatccattcctctattgagggacatttgggttgtttctagcttctggctattataaatatggctgctatgaacataatggagcatgtgtccttactatatgttggagcatcttctgggtatatgcccaggagtggcatagctggatcctcaggtaattactatgtacaattttctgaggaaccaccagactgatttctagagtggttgtaccagcagcttgcaatcccaccagcaatggaggagtgttcctctttctcctattccaaagcctggctgaaagacctgtttcccgatgtcccttttcttcctccggggacctggacgtcccaccttcccagcaattagcttctgccttctttgttgaccaaactgagagccaattagggaaccagattttagtatctgctctgcaggccagtgctgcctgaccagccctttctctcttactcttccatgagtacagcgcactcctcacatcttctttccatttccctatctctttgtttcctatgtaagtgaaatggtggcccatgtttcatggtttaattggacatccctaatagagctattaagtcgggatccagtggcagagcttcatcacagatggatagtccttctcaatgcttctgggatatattttgaatcaggacagacctaaacatacattttaacatcattctcttcattcttgtcctttggaaatgagaaactctattcctggaggtgatcactgaagtctgagttcatggcctgctggttccattgctttggacttggggtcagttgatatatcataacagtagaagcatatgattgaggttactaacttcatcatgtcagccatgatgctgagagggggagagaagctaaatgttatggctcccagtggtgaatccctagttgccaacctttttgaacaaagcccttacctctcaaattttctatcagttacccataatgccaccaattcaagactctattgataggttaacctatcactgtgattaattataatcacatcttcgtgtttcaagcatgccccaatgattagatctgtttgctgaagcccaagccctctacacctgaaccctacaagggtcacttcatagccatcctgtaacagggaatgcttccaatcaaaaactatacaagcttacctttcatgttctccaatggtgatttgttttgatttccagttataacttcgtttgacctttaggagagcaaaataaattttgctcatgtactatacaacatctcaaaaactgcttacctcactagattcttaactggtttgtttctcaatgatgatggcgaaggtggggggggggggtgacctcataaattccccaagttaaagtttatatgtctaaggagtcagcttgggtattcacaatggctacacagcaatgaagtggtatccttcgctgttggggcttgtcctgctgatctgacctgacatcatccacacagttagaatagtgctaatacacaatgggaatgatttatgtgcttgatattattttgagcatgttggaacccatatgtcaataagcatagtggggcagagcaaactggtacaaaattcaagaaatctctgttttaaggtgttagctttcatacattagtctgtagttctgaattattagataagcagtatttaaacaggaaataataagttggaaattctgcatttgctgcagaaacacttgaccttagtagaacagaagcatgtggaaataatagctgctatggattaaatccttgtggctttataacacacacgcctctccattatttaatttggcttaggttttattcaaccacccactgggcaactgatacattcctcactggtttcagttatcagtctattttgacatctataattattggctttgacccagagagacagaaactatttgatacataataggcactgccaaatacaaataactcaaaagttgcttgattctattacaaactgtctggaaaagtcaagatcaacggccttgtggatagaggagtctaggatacacatggaggactatatcaacagtctttagggaaaagggaccacagtttgagtgtttggcctgagatgaatgttcacaacttttttgatttctctctcaaatatttttttctatgtgaaatcacacatgaagttcagaaaaatagtaaattttctaagttaagggaaattggatcttctctattcttaaagagtaattttggttgcctctaccaataggagtccctgagtggctagaaaagtgtctgtgtgtgtttctgtccataagggcttacaagggtttacactgaggtctactcctcaagatggcttttcatatatgttctcaggcagacagttctgagtgctacagtagctatatatagtagctatatgtagtagctaaagaggtcaggagaaaaaagatacaaaatctaaaagagaagtcagctctgtcacttgaatagagggggtgaccgcagttaacctacctggaaagggttgatgatgcatctttccaagagattggttttgggttttttggtcttgttttgttttgtttttctatagaggaaactactttgaagaaaagacttttgatttagaataaaactagaatctctgggaagtatgtaatccaccaatccagagatagtgagagccaaaagccagtataaagtcaatgcgtgcatgaggctaagctttattatcttttcagtaaggattctaattttatatgacctgttttcaccaaagtaccactgcaatggttaaattgtgtccattaccttcagagatatattttgaaattctaactttcagtatctcaggatgtgatctgtttttggaaataggctggtaagatgaggtcatagtgaaatagggtagactcttaggccagggcaagtgatgtccttataaacaaagagaattttgacatagacatacatgggaagaacaccgtgtaaagacaaagacagagaataaggtaatgtgcttcaagccaaagaatgccaagcatgtgtgacaaaccgggagaggcagagaacaaatctgtccccataaccacagaaggaaaccacccttccatagccttgtccctaaccttctggcttccagagctatgagatcatttccattgtataagtcactcagtttgtgttctttattaagcaaacacacatatgtgcatacaaactgttagactccctaagatcatttaaacactgccctacttcaataggctatggtaaacaccacacttgataattctacaataatactatgcaaatcctgtaatattcaagcagacataagatcactaggtagatggtgttttcatcaacacatgaaaatacaattactcctcagtttgctctgcctttgaagtcatggctggtgtaagccattctgatcttctcccaggaaactggtcattagcctacccagtgatattgaatcagcttagtttctctgaaagccccaagtgcccatgattgctttgactgcctgagaaccaaacatgttattcatgttgtagagatacaaaactaccttttagcagatggagacattttagatatattttgaaccagaagatttcaatgaattctatttgttttttttttctccacaattgctaaacaatgaacatagtaggttaattgacaaagtggcatggatagttgtatttctagtgggtgacagaaatctagagaatatttttattagcttttaggataaggtatggtctgtcagaacaaaccatggtaggacaggataagcagatatggagttggcctcatctagtttggaactgggccttacttgagctgttgacagaggttggcctcagaggcttgcagtgacatcacattcaggtgactctgttctcttcacattttgcaataaaaacttgacactgtctggggaaggaaggccacacagttggcttggttcagcaggatgtgttcatttgagatagatctatttttacctgacttaatatttgaatgtatctgaattttttacttgtgtttttttaaatggagacagtagtccactggccaaggcatacaatatcatcttccatacccagaataatgaagatagtagaatgagccactcctaattattggcaactgtcaggatgacactgaaagcaatgtgtgtgtcattctaagatgacacctctttctgtatctgcagatgtctctgagatttctccaagtcctcattagttaaccctcgttttcctctttatctgttgctgttccttaaactccttctcattccctttctcctctatgtttggtttctggctgcttttaagcaattcctttctttaaaaccttgagatgcctttctcccaattattggtttactaagtattaggagttggtttgctaacacttcaaggatattccaaactgaggtacactcaggaattggtggacatggtcatctcactgttgtactttctcttaattgttataaacatagactcttgatcattcaaagattgtctgctgtccctgacctgaatttaccccggtaccacttgagtctcagactttggaaaaaaaaaatatatatatattttaagacagggtttctctgtgtagccctggctgtcctggaactcactctgtagagagaggctggcctcaaactcagaaatctgcctgcctctgcctcccaagtactgggatgaaaggcagagagagaccttaaatatttagtcaagaattctgacagtcagtagaatgaaattcttccactctcgatatctaatcatcattgctatctgacaagttcctgaagtcccaccctctatatcttatcactctggcctgccctctgcaaggttctttttggtttagttttatttttaaataaagtagcagcagtagaagtctgtctagccttgacgtttcctctttcattttctacgcactgaccccccaactctgctcctgatctacaaaattctatttgcacgtatactggacttgagtgtagtttcttatctctatgacagaaccagagttttagttgtcttctgaataaactcggcctcattgtcttcaacaatttggggagtgaatttttttgcagtaaaatactcaccataacagactataagattttcaaaatgaaactttctccttagctctttaattagtgctgagggaggcagaggcaggcagatttctgagttcgaggccagcctggtctacagagtgagctccaggacagccagggatactcagagaaaccctgtctcgaaaacaagcaagaaagcaaacaaacaaaaggaaagagttttcttttctctctcttctccctcactccttatttttcttcccctgactcctgtattgaatagcattgaaagttcctttactcattccttagggcaaccataatgtattcagttagatagagaatgttcacataattatattgtgtaaagtcaagatgattttatcactgtaaacaattctgggctagtcttcacttaaccagtaatgcctctaacttcacaaatcatgatgttatctatcctattacaagacatgatattacagggaacttcccagaggcatgcatttcatagggcttgggattttaaaaatatattaataaattaattaataaaaaataaattcaaaacattcatatgcatgttaagggttaatgttcctttcagagatatctgcctagttttagaatttagaaactatgatttttttttaattgttctggaaaccaaaggtgctaatccattaacagttcacagtttaggaattgtggtttccgaattgggaggttcaggaaaaaggagaagttcattagtagagagaattcaaaagattagaaatatccccatgtaaagtgtaaagagaggggctagtgtttaaacactaagatgatacaaactacaagtgtaggttcttttccttgggagcggcatggaagggatttaaagcatcccctaaaacaagtacaaagttacatttcctaaggcttcaggataatgtgtaggttcttatggacaagcaatggtaatatcagcaggaaatatgtatcctgcatccctaggtgccaggtaaaagcagtaagtactttgcatacattactgattcctcatggccacgtggccaggtcagttcttttatgtctctgttttacagaggcttgtgtgagatttgaaagagaaagcaaccccccctttcacttttgtttttaatctttaaaaattttaaaggtatatttaaccatttgtgtgtgtgtgtgtgtgtgtgtgtgtgtgtgtgtgtgtgcgcgcgtgctttgaaaagttccttcgacatcttcaaacagggctgaaaaaattatatggacaaaatatttgagtgcattcgacttcagactcaattatagaaggcagacgaagatgaagtcaaggtttatttttttttttttctttttttggatcatgtgagattggttctttgaagtatcttagcgttggactaaccatcactgagcgtgactggttagaataaatccaaagggtttgataaagcatgccagagaactttgaccactgtagttcacaaaggcttgttaggacatagacttagaagtgtcccccaaccccaaagcacacatcaccaaagcgtttttgttgaagacttagacctcagtgctatgctcagatataggactttggggaaaatgagtggatcatgagggtactgatataatcaatgcaataatccactagtagattattaatggaatagcatattattggaaggatgtggacactaaaaactgggattggttgagggaaataaatcattgcagtcgtgttcagggaggcagaggcaggtggatctctgagttggaggccagtctggtctatagttacaggacagccaggactatacagagaaaccctgtctgaaaaacaagcaagcaagctaacaagagtcatgcattggtagagtatattgtgcatgatggtagctgcttctcctcctcctcttcctcttcctcctcttcatcctcctcctcctcctccttaacctcctcccaaccctggaccgaaccctctgaaactgtgagccatgatgaatcttctcaccctaaagattgtttgctcagttattttgtcagtgacaaaatgtagcacagaaatgtcagttcctgtccttagaggcaacctgtgttccaatgactatcccaaccacagtacacagcctgttctccacaatcaatctccatactgtatctgtgatttctttaaaatgttatttgacaaactgggcatggtggtgcacatctttaattccaccagaagacagggacaggtgggcatatctatgagtttgaggccagcttgatctacatactaagtttcaagctagccagagccgtgtagtgaggccctgtttcaaatccagtatcatttgcctataatatctatcttagattataaccctatgatattggaattgtggctgctttatttcctggctatctacccattatctatagatatagccctgaatctaacacattcatcactcaataaaatattaagatgagaaagtaatgtttgatgtttcctaattataaaatatcatgaaaatatataatatgtaaaaaatggatatgtatatattattaaatatacatttatatatacttgaagatgcataatgatttctgggtactgttttgcattctatttggtactctttaatctctcactcaatgatgatgggtatattaatctcaaacccaagttaacattcatgcatttaaaaaatgaataactgtagataaagtgttcattttcaaaccagaacagtggcttctggagaatgtaatttgcattcgtcctcagcaaaccacagagcttaccagaaaagtaaagacttagtatgtcacaaatgcaagcaaaactgtgtgcatatatcgtggtgacttacttctgccttggttgcatctttcctgtggatttaaatgcagcatctttttagcatggctatgccccatcgtttgcatgctgtggatattcacttaaaagcttcatcagagtcatgtttctgtctctgcctttgttttgctaaactcctaagagacaaaccttccctgactcttcaccagcaagcctagattcacggagactatgagcccctctcttcttgaagtctgtcttcagagccagctcctgcgggcaggcgtgcatcttctgtacttatttaactgtcctcacatatataacgtgttcagcccacccacatgttcacatcacagatactcactgggaccttcctgattcacacctctgctttacgtgatggggataaggtaaaacacacaatgcaccccatggaggtagcacacatcaccaacaaatgcactaagatacgtttatttatttgctaatgagatttccttgggaaatcttctgctgaggatcaactgcttttaagatttgggagggtttctaaggagatgtgagaacattttttttttctttttagttctcttaggcaaattttagatgtttttaatttacaaagttaattttagaaccccaatgccgtatctaaggtagtaggggaggcctccccactgcacatctttttacagatgtaatgcattctttttgctttgttttttcaagataggatctcacggtgtagctctggctgtcctggaactcaccatgtagatcaggctggcttcatattcacagagaaccacctgcctctgcctcccaagtgctgggattaaaggtgtgtgccattccacttgttgaaatgtagcctgttctgttctggagactaatcaccatagcaatgagtactcctggccaatgagatttcagctgagttcctttgtaaacacttttaaaagcttatataaagaagtattataatcaatacaagagaaaaaattatgctggcaaaagaggcaggcttgtggttagcacaagaaacatagatccaaggttgatgtggaagaagatgggagaagacactatttaggatctaatcgtaatctaccagactctgtcaaccctccaacttgaagagtattacctccctcctcaaatcggattgagcgctcatgttagcatcttgagtccacaaaggagagaatggaagttcagagacatgaactgcttttctcaaaggccaaaaaatgcttcagcaagagtttgcatcttgcttcaaattaacctctggcagtaaaacctctgaaggctatagagactcgaggtgtcaaagaatgtaggactacactttttttttttttttttttttgaaccagagtcatccgtttggaattctgaagtgtttgcaaattatcttacataaagtattaattcaaaatagcagctgagcatggtgtgtgactgatagaactctatcccaggaatgtgaagacgagtctatgaactttaggtctttacaaacctgtgccttcccaagaagttgtttctatttattacattcaactaaaataccttaaaccctcactcacaatgtctctcacccttaatgtgctatattctctccccaaaatgagtcacttaccatctcacaggctcagtgttgttcttcacttctaaaagcaagttcctctcagggaatagttaacttgcacagctccagcacatttgtttggaagtggtgttgtagaaggcctgcaatggctgtcaggtcctcgaagatattctcagctaagcctcatggtgtggcattgctattatcctcaatttgggaatggctgaatgggggggggacgggactaaagctgcgaaaggagagataaacagagccgtctactgtctatgagaacaagagccatgaaaagctgaaatgcacacataaatcaaagtagagctatagcaggggctagctggtattccctcctttatcagcaatgaccttctgtctgctcagtgaggaagttaggctgctaattgccaagaaaggtgacatttttctccattcctgcctcacactgaggggcttttgtcaaagatagatgctcacagctttcttttctatttaatattcagaccctcatggcaggggatcccataaaggggtctcactgagcagtcagtctgtccttatcgccactgtattccatgaactcatggaagtgtttctttctttcttttttttttttttaaatcagaaagagaatagcaacaccccctccccccttcttttcttcagagaggtagagttaactttattaaatgtcaatatttaaacattaaatctgcaccgtcccagcttcttgtgggaatctagtaaaaccttccaaatattttcttagaaacagctttcaatttgccagttcatttctttcataaataaaaacacagaagtcttcagttacatcccatctggggaatgttgagtggtcagatccagcccaacacacacacacacacacacacacatacacacacacacacacacacacacacacacacacacacacacacaccacgcggtccattctactctatttcctaatactttccatcactcaggcactcctaaggatgggatgggggtactttgtatggcaactcgagatgcaggaggatctgttacaggtgccctggctgaaaaggtacacttctttcagcaccattgtgcatcagcggtctccggttacaggcaaagtaggtgtgtagtatatgactggacttgcctcagacgcaagtccacaagtcccagcacagagacaccctgtgctccgtaaactgatccacctcgggctcccattaggtcagccagcacacagaacgtgagctcacatcagagatgtgggaaccggctggggctctgatttttatctggccattcaagaactggagaaaagagtggatttgaaagtcccattttgttgcaaccgtgaagaccatttaaacatcctccgcattctcgacttagaattacaacttttaagagtctgctaatatttaaaacaatttgatattactatctagtctgctaaccccatttaaactgattttctaatttttaagaattcttagtatctgatataacagtagttcatgtatttttttctcacatgtcaccactaatatcattgagaaagattaatgaaaaaatatgacacactgtgcctaagtcacatccttgaacggtggctcccagccttcccaaggccacaaccttttaatatagcttctcatgttgtggtgacccccaactataaaattgtttttgttgctacttcataactgtacttttgctactgttatgaatcatgatgtaaatatatgtattttctgatggccctgggcgacccctgccaaaaggtctttcagccccacaaagggggtcacaactcatgggttgaggagcactgtctttgtgtgataattcctaatagcagcagatttcttcatgtatcattgtacaacctaaatcatttactgtgtttttctaagttaataagcatctgagagggaaataacatttatcctattaaggtatttgcagttcctctggaaccagtgtgatgtaggtaagagacgttgatgagtctgtggagaaaagaagacaccgaaaaagcaaagccaacgccttacatataaccttcagcatgagatttctcattaaggctccaatgtgcattgtcttgggcaaatctcccagacattcacattgtgtaaagatggagagaaagcagtacgctaccatggaaataaagatttccagtcaacactggagcacacccactgtatcaactgctctagtcatagcagcatacgtctttgcaaagtagactcattttaaataacatctcttgtgatgggttctacttttctcactgttgactgctcttctagagaaaaaagtaaaagagaggaagggaggaaggagcgaggcagagacaatatattaagtccttcaattgtcactaaatgcctcaaatctcattatcagatcttgaaactcaggttcagaaaccttgagggtttttttttttttttttcatagttgcagatctagtaagcggcctctatgacatctgaggctgtctgccttcatgaggagccatggcacagagatatttaactatgaattctacgcagcctcagatgcacgtctgcagagtctgtatctgtggatgaaaagttttcaagaaaaagaagctgagtccatactgaccatgcactgagttctcctgacacaatttccttaacaacacggtgtgatgagtattcacaaagcatttacattgcgtcaggcactgcaaatgatctagaggggatctgaaatacacgagacggtgtgcagggcatatgcaacacattctatggcatcttacaggggggtattgcaagtggtaccccatagatgctgaggatgatgatgtcattttcaggcctgcatcctgtgagtgtggagatagaatggtttggggctgatttctgtacatagaataaaatgtctgcgcaatatcttttaatctctaattaagttagaggttgagttaaataataatgaattaatgtttggtgagtgggttaaccactggctcatacaaaggggggaatggccccaataaagattgagttgtttatgagtacccccatcccctatcccccattctaatatacctgtgcaatactttactgacatcaagagttatctactaactaggcacttacagtttttgcagtcttatactttgatttcatgaagactcttgggtaccatggccacatctcttgattcatactagttggcattgtttgtttaccaactgcaaggtactttgtgatcaaatatgtaatccttgtcaatccttaggaacgtgtgaaccacaacaatgtacattttagtcatcaggctagcagaagacaacaatcaaaattggatatgtcagtgagagtttaggaacagaactattttgtatggcttaactacattataatgatcatgcaaaggatgttggaaaatgctgccatttcttttctaatcctaggtaaatgtggaggggggggagaactaaacaaagggctggaaatgacctatgagggatgctatcagacttctgcgactactcaggggcaactggggaaagtaacgagctacccaaacccatgttccttgctctcctcttactgtctaagtcccctggaggccagaaagtagaagtgtgtgctgaaacagatacagaaaccaatcagccatgagcatgtacaaaggtagagatctagtgactcagacataagctagccaacacgagggcctaacaaaattaactaaaatcagaattgaaatgaaatcactagatgctaaaaccataaacacattatcatacatattatatttctttttctagctttcaatgtgtaaacaagaaaatgaattacattacctgataacaggagatgacaaatagcttccaaagaaatgctttataaaaacgactgctgtgacagaaacaccacaaataaacaaatctgtggaaaaagatattaatgcattgtcttctctaccaagcatttttatttgattttgcactttgtaaatatatatccaaaacattgcaaataacccgtgttgttagcgtatatcaacttcttctgtcttttaaatcttcacttcatttcagtgactgagtaaaaaattttgttttgtctgccatgtcacgatagatggaaatcttttcagcctgttttgaaaaggcagcgtttcccagccttggtactttgaacacttgaagtcagatcattctttgtcactgggagggcctgctccattcaccatagcatgttcagtcacttccctgtcttctacacaggattgaccagtagctctcaccccctgagctgtgatgatccagatgtctccagatatgaagaatgccccaacaggaagtttaactgcctccagtgagaacctctattgataatgccatgtacttaagagtaccagatcttagacatcaaattcctcattgccatacagggactctctgcctagcaaactacttttaagaaatagaagagctgttacatcacttggctaacttgatcaattcaatgacaattgttaataaggcttccctgagaaagtgattggatagttttaactcaaatgagaccttggacaagatgacttgcatggtcacagtaacaggaagccgttctccttactgtaatttccagctgcctggaggggagccacagctacaggttgtctagctggaagtgcaccaagagtgcctgtcatagtgtccccatttttctaatttatttctagtgctttttgtataaaaatccaccatcttcagcctagactctgaaatgccctcctgatttagactccttgcaattattattttgttttcttcttgcctatgattcatactgtggtcttagtagctctttaaaaatgaaaagacaatctttttacactagttaaaaacccttagtaatttccttgcccagtgcagcccctacttatccaaattctcttaaaccgactgccctttagcgctctgctgtcttgccatacttgttcatataaacccttgactgcgagtcttgagcttgccagtcccctcctccagattacttccctgtagttaatttgcattcttcagattccagaacacatggtccctccccacccaagcttccctgattgcaagatgtcaagccatcagcacaattgatcagaattgaatccctcagtttgtttaactctcttacagggctgcattcctttttgctcatagcatttatcttcctattccgtgacgcatccagtaatgtgaccatttgactaatgtcactcttttattcaacctaatgccccttcttggcaggcgcggttacattctttttccccaccagtacataggaaataatcaataaatatttccagaagaaagagaaaaggtgaaagagataaaatcaggaaggggaacgagagaaaatcaatcagagaaataaatgtcagacatcagtgtgtgactacagccaaatgtgctattttttttcttatctgactcgtctatcttcacaaatggttttcttccccaggacaaggacaatcccatgctgttgtactgatcactgaaactgctcatcaataggcttctgaccaaagacaaaacatctccaggttcaaactgtatgaaaatgcttcctggagggtcagatgaacagcgagtgcaggagccatgatacagagcaaatatgccttcaaaacaaatgctccattcaggtctctcccttaaactcaccactcacttcattacataaggtttttgaaacgtgtataaatgggggcggagggaaagagaaagagagagctttattttattatttttccaaaggcacagagagaacatgattatatttcaatgcataatttatgtaccctctggtattaaaataaatagtaaacacacagtatttcacatcctccgtgcatggcgatcaagtgaaaggtggtatctatgaccttggtctatgggtcatcctctcctttcatgacaacctctgttttccttaactattcctcccatcagtctttggagccacaatccattacacagcctgtcttccttttcaatccatttgccacccaccactaacaaaggatactgggggaaactccattagacacatagcaggctttcccccaccagaaaggattgtcaaatagcccttgaaagcaatttcccattaattgcaaagtgactgtgtataaatacttttagcactatttttttaaaatgatagtcagccagtcaggatcaattacagaggctagataaagatggtgagacaggaagaggggacaggaggggcaggaaaaaaaaaatgaaccggagatgcctgaaggttgagctctgtggtatttgtaaacgtcatttgggactgaatggtggatgggtttcagagacctcagaaccccaagaatgcataatgttaacttaatagattctttcaggcctaggtttctgcagtatttacagtaaccttatgtccgtggcaatagcataatagggcctttcagccccaagtctcagattgttacagattcggaggctatcggtttctgaaccagctggctaataacacgccagcctacgcccatgcgaccagttacaaaacaagatgctttctaggtgatttctcaatgttaacacggtacagtgataattctgtagatcggattataaaggcgtgcttttaagaaatgaggaagtaaaaattatgtaaattctgctggtgtggaaaaacaatcttctacaaactgttgaacatagaagccacgatggttcaagcaggaattttcattacagatactggacgtagagaatatatgtttacttaaaatttgcctagtgtaaaacagatacttcaatgaggtaatttatgacctgtttccacatttacttgtcagtagttgaatgctgcagttttgccctgttatggtctgcaataaaaagaacccagctctataaccacagacggtcaaactggagaatctgtagtatatacttattttactctgtagagggttttttttttttaatcttcaatctttgcatgtcaccagttggatgcacttagtgtttccgtgttgtaaatattaagaaatgtacatagatttatgacaaactcttacaatcgaactctgtgtgatttcgagtcaaacattttctcacaggagtgtatcacaaaggtgaagttgttttctctatgaacgtggtcttggtttgaccttcaaagttccaaataaagtgttagtgggaagaaattcaaagtaaaccattgcaatgagtgggtctttggaaaactcacctgtacaccagagctgtacacatcgacaccccagactaacaaccttcctcagttttgctggcaataaattactaaatattttagccactggcttgttgaaactgaccatccactcaccatcttctttaaactcccatttaaagaacccccaaaggaaaaacaacacgggaaaaattattagtggtaaatgacttcttaagacttacttttaacataataattgaatacacagaagagcagagttcaggctcaggttgaattctctgtgaaccacattggtttcaacttgacttacaagaactgtgtggagctggacagaccctcagcagattagagcagtagctgctcttccagaggaccttgctttggtgtccagtccacacatgatgcttcacaaccatcttttattcctgttccagagatccatagcttctcctggcaaaaggcatccaagttattcacaggtacacatagaggcaaaatacccatacatagaaaatgataaattttttaaagcttaaagtatcagtgaatcttgggataaagttttagcataaatttttaaaaagtcactattgttcttttaggtgagcataaatcaaggcacataaatggtctataagtatttttaagttatgagtaaaatgagccttatttgtaatgctttgttggatgccatcttgagaaacttggctttatttgttccataatctggtgtggtgatgacggctttgttttacatcacacttgcttgtgtaataggatgtagcagtggaataggtcccaggaacactattttatttgtttgcttctgttttcccaattagatgacaggagtaaaacctccttggatgtttttaatgttcacgagagcttttgtgttgctgttcaaatagcatccatttcaacacagcaagatgtttctgaatccaatcctgcggcactttagcaaatgaaaacttcattttccctgagtcattgtttgaattacaaaatgtcatcatccagaaggactcgctgtgtccataaaacaaatgtggcacgatcatcagtgttaatgtcagcaatacccagcaagtccgtaataacggagcagtcagcataggttcgtgtgtgcctggtgctttgatttgtcacgtaacattctaagtggttgataatgtcaagtgcttagaaagtgaatcaaatctgttttcctaatcaccacagcaaaaaaaaaaatatacgttcatttatttttgtttatgatgatcatagtgaattggaggattttgaaacatgaagaccctgtgagatgcctcaggtaattatctagctaaagatggcatcttcctttgtaagccttcccattttcttcaacagtggctgctgggaaccctttgagatgacagggattcatctctagggaccataagaatatgctgttcaactgaacagcattgcagaacacctactcgggctttacatggtccatgactattaagtcaaatggacaggaattagttttcaacattctgttttcacaaagcctagaagtttagtcctatttaaaccaaccctttcttcattaccaggtaaaacaaaagaagctatgcaaaatattgctatgcccttgtataaaatgattgctcatttttgcaacataatacacttaagtttgaaatatatcagctggttcttaataaaaaaaaatccacatactttttccccagaaagtaagaggataagtatatatcacttaagtcaaattttactttcttattaatctgctttttctcacaaagagattagaggaaaagttctaaaaatagaaatattcatacttaattttattatcattttcttgtttgatcagaacccaaagattccacttagctcatatgcttactcaggctaaattatctgccatattggtattctgagaccaatgatctacaagtaagtaagacgttttggtaataaaaatacaatattccattattgttatcttaaaccaccaagaaagcatacctctttcatagttcatgttcattaccttattctatctttcttcatcctctaatatttagcctttattgtctttttcttcctgttcttctgtatccatgggtatatttgtttatatacttacctatattgctagctagattcattcagcatatgaaagagaatatgcagggtttttttttattttttcattttgggagaattgtgacctcacttaatcttatgcacttgaagtctatccatttttttggaaaaaatttaactctatttttatttagtgctaaatagtattccactttgtatgctaatttttcattttcatagaatactattcatttatttgttgctaatttttcctttgtagaacattaactattgttcttaaaccttgctttgtgaatgactgttttataagcaacttcaatgactatttagtccatgtcaaaacactcctcttaaaaaggattgaatattttttgtttgaattcaaacatcttagcaaatgatctcactgactttccaaggtctgaaaagtgttagtgcaaagaaactccaacaaataaataacaaaaaaacgttcttcttttgcaaacagagacatacaaaatctagagaggtataaaataactcattgctcataagaacaagtagcaatcatctccagcatctatgtggctgatacagcctgtgagttctttctatagacactccacttaaaccaaagtcaatgcttcctctacctgtggtgcctgctaccactacagtttgtttgagcctgctgtccatgctccatgatacacctgtcatgagttcaggggccaggactccattccatcttccacataccatcctgagctttagaggtttgttttcaactattttccccagctttcttctagaataaacttcaaaacatagttttttccttcctaacgtagattagtgagaacagtgtgctttgctgaaactatttggacattagtttgaacagtcttacaatacttcagtctacctcctgacattcaaactgaatacagaaaagaatcctaggaccctaacctttctgcagagatcagaagagatgatggtgttcttgtgacagcaaagggcatttgtctttgattgaaatactctaattagtctatttttcttttaggatctttatctcataaagttgtgtaagttgtatagtcataccaatgaggaataattaaaaccttattgaaattcaaatattgatgaaatataacagtgtgtctttccacttcagaaaaggcttattagtagaatcaagaatgggactttctagggctggagagatggcttaatggcttagagtattggctgaatttccggaggaactaggtttgattctcagcatccatgtagtggctcacaaaccttctgtaactcacacatataatacatgagcatatacacaggcaaaatacccacacacctaagataaataattaaatgatttttaaaaaaaataatggaatattctttgttctagactccagtacttttccattaaaaacatttttttgccataaaacatatatctctcagtacctcttaactgagaaagcactgccaaagacaaccagtgtatttaaagcactctcttcacctttaaaatattaatgtatttatacttataattatatgtatgttttatggatggataagtaacactgaaagaaaccttgtcttaaagagtatttcgtaggcttcttgggtttactttgtagttctccatgaatttgaatcaccaagatttgggtcagcttgtccactgggaagatgtgctctattttaaaccatccatcaggttcttgaaatttctttatcccttggagatagttgtacttttcatttggttgagtttctattaaagaactgagctttgttaggactttccagaaaataaaatattcttattatgtttgtactttctttccttcttggtggttgaaacttgaggtccactttaaataccaagggcaaactaaaagttgccttaaccaacacttcatacttctgcccctgaagctgagtacttctgttctgtgctgtagacaagggtgaagtcaataactgcaggaaactaccaaagtggaggaaagatttttagtccttactgttttagggtcactatatgcagatagaaaattatatatggaaggcatctctccatagtcccaagtctagaaaaagccactgtcaccacacaacactcgttcttgctctccaaaccatgcgtcaccactggactgagatgggtcacactccagaagcttgtactgcctcatccttatgtctaagtataaagatgtccattccaagttcggtgttggtgctttctgcttgtagactgggacgctgctggtcttgtactgggagaccaggtatttacttgctggcattttcctttcataggtagtgttcacattaatgagactataatgcacaaagattaagtttagaaaatcgaggtcacagaaagaggccacggttctcgagtaaataaaatttccattttcaaatagttttgaatggatgtatggcacttcctagatttttttttttaatgtatgatattatggtcaagggaatacattttctaaaagttatgctggatgcaaaaatcatacaggccagtcgttctctacatcaactgagatcttggaaggacagcattctaattatttgcttgttctctgcatgccctactgattttattactcttggtaccctccatggagcaatccccttgaacctaattccttattacccgagccagtttgatcagtttcaaggttgtggtgaaacatgagagtctatgagaaagctctgcaactcacctccacaaacgtaggacatgacagcactatcttggtttcatgagttatcagtcactgttaaatttagtgtgaaaaatcacatgcaaaatggaattagttctttttattcgtttctttccaaaactgtactagactgtgagaagaacatcaactatacttgagttgctattctggaaggaataaaggagcttcagagaagctttaaagggtatgtactgaccagaaacttggtcttctccacactactgtcctagatgaccatggataacatccatgtgtccagctaaaagtgaacaggaaataaattggatcattatggcaacaaggattatagaatctcctactatgcactatgctaccaaatctacaatgcactgttttaccattaggcacagtgttacattctagtatttgctttgtggaaactctacagcagtcttaaaagagccagtgtttcatcctctaaagattaaggatttttaattcaaaattcagaaatgccaagtaatttcttatttcatacctctccaaaatcactaccaaaaaataagcgttattgttccctttgcctctttagaagtaacatgatggctgacatttgtctcttctatagaatgttccaggcaggcatctcactgagaaccttcagtgggtttaaaactcttgcagttctcctaggaatggtccctattgttattcacaaatgaacaactggagacttagagaaattacgtaacttctataaaggcatacaactagcagatgccaaggacagatgtcaattcagccaaaatggctttggaaagagctttgcttcactttgccatagaatgaatgtcacagctggtaatatctcatgaaccctgaacaactaaaccatttgctctcagcagcagtgaatccaaatacataacctcaatcaaagcaacttgaagaaaatgcagaaagtatctggggttgaacatacacaatggcttttaacaatgattttacttttctttgtgtgtatgcttatgtgtgtgtgtgcatatgtgttcatgcagatatgtgcatggggtgcctgtagagatgaaagatgaagttagtcttttcaagaagatagccaacaaacttaaaaatggtaacagataaacaaggccaatgaatagattcactaatttagcaagtatctactttggaacagagtcagagtcaaaaccttcccaaagattgtgatgtcatactggcttcaataactcctttagaccctctggcctctgatatcatgattaactcatgtttataaaatacaacagaaattactatgtagagtttcagttttgtaatttttcctttcaagaattcaaaataaaacttagaagctgaactttgaaaaaaaataggaatgctgtggtggttcatgcctgtaatcccagcactcggcaaattgaatcaaatgggctacaagttgcaggctagcatgggctacatagtgagaggaggaggaagaagagcaggagggggaaggggaggacgagaaggggcaagaggaggagaaggagacaagaagcattcatctgtgtttgaaaattgtattttctgttgcagcatatcattaaaaattttttactcagattttaaagaaggcatagaagtataacaacgtgtttgaaatgttctttcctatgtatcacaggaaagcagaagtatttatctaagaattctgatttttagataatctatatagaggccattttttaatgggtctgttttatgccatgtgccggttttactaaggggctactacttcacattttgttgatttcagatttatttatttatttatttatttatttattcatttatctagtttttatttaaagttgaacaggaaggactcaataggttacttttaaccataaatttcaggtttcaaataattgtattacagaaatattctgagtgactaaatgttaacttcacattctgcttgtgtcagtgtttgccttcatacaaattgtcagccagcacacccacattttttcatgctaaggagtttataatcccttattgaaaacactaccaattatttcaactttattttcataaaagttatttaaatatatgtttatgactacaataacattcagataaataacattctcagacactattaaaagttcttagatgtcagtaattgggtgatataaatatatatacatatatgtatatatatatacatgtacatatacaatacacatatatctttacaaatagccctttggaatttaaaaaattatttaggccaatatttgtgataaccttttctcaggtcagatgtgttagttatggttctattgctgcaaagagataccatgaccaagacaactcttataaaggaaaatatgtaattcggactggtttacagttttggagatttaatcaaggaggaggctctgattccatgctgggtgtagcttgaatttaggagacctcaaagcccacctccatagtgacacatttccttcagcaagtccacacttaactctagtaaggtcacatctcctaacgtgcacttaaggtcacatctcctaacgtgcacttcctgtgagccaagcactaaaacacatatatctatggggccatatctattcaaacaaatacagtacccacctataatcccagcacttggaggcaggcaggtcaagagttcaaagttattattggagaagtaattagtctgagaccatcttggatcacaagagaccctgtatcaaaaacaaacaaacaaaaaacaatcctgaagcaaagcaaaataaataaaagcttttcttcaacaattttggtaaagcaaaaatgaggttaatctgattaggaaaagatgggatacacagggtacgtattctagttatacattaaacagtaaagatggcataattttgcctgactaaggaaaattctagggtaatttctttaggaaaatgaataagtaacacaatttatgcatcttgttttatgagcttgaaattataaatatttggtggaagataaaggccggattcacctcaacaagacagatggttgtgaaagattttacaggcaacctcaccacaacactacctattggattatccttgctgtctggagtaaatgtggtctttgcttctagttactagagcagactctttcacaggtacttttaattgatacacaatttttcctatatatttgtgaggatacaatgtaatgctttgaggcatatatattgtatataatacacatataaatatatatttatgtatagtatagtaattatatattatattatgtattgtatataatataaatatattatatatgatacatatatacacacttatatatatttttctagtgacatattcaccatgaagaaatgattaaaatgtaagataaacagtgatatattgattactctgaattacattcttaaactgaaatgtttgagatctctctctctctctcacacacacacacacacacacacacacacagacacacacacagacacacagacacacagacacacacacacacacacacacacacacacacacacaaacacactgaacaaatttccaagcagtttctcccttttaatacatttattcccacatttctaaacagatcaattttggctctataatccacatattcacacttattctggtagaactgcctttattgtcttttgtgatttttcttttattattatcgtgacacataacccatcttcctcatctctggtttcttcctaaatcatttcaagttattgagtaataatacttcaagactgttgcctctgcagcctcacagccctgatcatcttatatattgcatcggtttcaagtggggctctcagagctggattcatcagcttccatatgaatttagcttgaattttcttagataacaagctggtcttggggctggaaaggtggctcagctgtttagagtacttcctgttcttccagaggacaggtggtaggattcttccacccatatactgcagcttacaactgccagtcaggaaatctgacaccctcttctggtctcagaaggtacccacatatatgtgttataaattcacttacacatacaggcacacatccacatacttgtgtgcacacatatatacatgcatacacacacgcacacatgcacacaaacacacacgcatgtatacacacactccacacatacatacacacatgcatatccatgcatctacacatatgcacacgtacatataaataaaaataatttttaaaagtctggtcttgaacttgccaaaaatattaaattcctattgccctatatatgttggttatttgctagggtctctatacatgattagtagatcattatataattaaaaattatagatcattattataatttaaaaaattagcatctatctaatttactctcttacttggaagcatgagcatttgttcacccatcacccctacgagcactcatcaatctttgtcagcatcataaatgctttttatagttccaacctctctagctgcccagtatgcaaccgtctgttgcgtaatcattgagtaaatgagtggattcatgcagttataagggtgatgctaaactatcaaggtgaattactattggactcttacatagtactgggctcaagcacaaacaaatctactaactgagacagaatcactaatacaatttttcagctcacatttgtaaccctgaatattaaaccctggatcaattatatgaatgtaactctgggaatttctcggggtttagctgtttggttgctccttaaatggattttaaactcaatgtttcacaaaatgaaaaataaagattttcaatagtgattgaatctccactttaaaacgaaagagattcaacatccctgtgtacacttcagtacagaagtgagatgggacagatcctgaggacaaccaccacttttattttctcatcagatgaccactgataacccttgattccaacaagcagcttctgtccagttgagcttgaactgtaccatatgatcttttcatgggatcaaccgctgcttgcatctgcctactgtttatggaccctgggactggctgtgtaacactataccatccctttctaacaagagcatcctatgtgaaagcctgctctgctgcctgtctcccttgatctgaagcagacagccctgcatcatctcagtacactgtcaatgaaagggactgtaggctcccttagcttggaaagcatctgcccagctgaaatatgagcaaaatagaattcctttcaggacaaagcagaacttttttttcttttttgcacagctcaattaaacatcccctaggcaagagtggttcagattattaccattaaatgtatcatgctgtatgactggttgtacaggcataataacttttagatttatgctccatacagtgttactgaatttcacaatactttgctctacagtgaagctcagagcatccaagcaacattctcttcacctttcctgaagacttggattttgggaagccccatgctggcctgacacttctcacacaaatctccatttcatttccactacacctttgttctttccctatgggtaaagatgacatcataaagctaacatgggctatgctgccagaactgactactttttgctcttttagcttttttctgtttattttgtcacttactcatttcgagcaaaactgtctttaaaacaccaagaaatgattcctttccaacccagtctttattatcaaccgatcaggcaggattgtcttaaatatcccatgcattcagttggctggattgctttacttagagcataaatcttaacacatcaatgccttaacatatatggggccttgttagccacaatgcatgtagacggattaacagaaccttggctactttgtcctattttcaagcataaatagcatgttagtaaaagaatatgcaaccaaatcacaagataaggtatttgctcaagagtcatgatgttgtcaccagcttatttggatagaatattagccctgtccttaaaccataacttcgttatcttttcacgttctagtgtattggctttgacacagggacatttgtcttctttgactttatttacccatggctacatggaaagtggtttggaccatatctcccttagccttccacacttccgtttgctacagaagattaagtaaggcttttccaatggttcaataacacacagtagcttggacattatgtgagggctccttgaattattgaactattgccatgtggaaaattttcccctgctacatgttcagtgtttgtacagaagggtatcgtggcacagctaggaacagcttaggaagcagtgaatcaacactatgcaactagtttccagtgacacacgccattgtctttcaaagaagggctggctctctgcagcaccttctgtggatttagatcttcattgctgagtgaatactacaggcatgtgctgaagagaggggaatgaagactccgtgggggtcacagaacaccacagagaagttgagcaaatgaatgacaaattaaaatggaaggaaaggggatttcatatcaaaacccagggattatctattcagataaaactacgtgaccatgcagccatggcacatctcacataagatagtgttctgagtggaactgtacctgcatttcaaaaggtgatttccattctttaaagcttcatcttatcagcttatggaggttctagttgaactccatatgatctctcgggcatctttttctggcccctttcccctttctgagttttcctcttgcagtttcttgtaattatttggggtgtcaaggtctaccctttcattactgccagaacttgtccttggcatgtgaagttagcttttgatgttggtgtccttgatgaaaggaaaacaacctttcctggcatttcctttcctctcctctgatctgtatttccagcccacagaggtcagtgcacacgaccgcccattccagctttgaatgcaacttcaagacacaatccacgctctgtgtgagggctttaatacaaccaacatcaatgtctgccaaccacagctacacttgacactgctcacacttctaatgtagtaagcctattaattctcaaatctgctgaatgtgcacacggccaccaatttgtctaaatttgggagacagtatctaatgaagaaccaccaaatgcataaaataacccccattttgtacgaaaaaattggaatctgttttctcctcctaacatattccattaaaacaaccaccataggatcctatcacttacccatttgtgctacatgatatcactgtgcctacacaaagattttagaaaatctcaatctctctctctctctctctctctctctctccctctctctctctctcttagggccaatgatccatcttcataaaggaacagttacatattataaaatatgtagtatttcatatatagtaaagtatgataatacattaattccctttagctgagccttcctgatgagttttcttgcttaattttaatccaagtggagttttgtgatatgagtttgtgaccaaatgttttcaatagtagtatttttaaaagaacaagatgactttggcctagaagattcaaagatacacatttaaaagctagctatatttttgtgaaaataaaacaaaaccttataatttgcctactaattacgtttccaaaaaaaaaaaaaaaaagccaatgttacattgtatgcaactgctctcttagttacggttttattgctgtgaagagacaccttgaccaaagtggctctcacaaaaggagacatttagttgggattggcttacagtttccgaggtggcagagtccaggcagacgtggtgctggagaatgagctggggcagcaggaggagactgtgctacgttgggtagaacttgagcataggagaactcaaagccctgtctccatggtgacaaactttcaacaaggccacacctcctccattaaggccacatctcctaatagtgccactctctgtgggccaagcattcaaatacataaatctaagggacccaaacttatctaccccaccacaatggctgttactcaggtccccaggggggggcttgctgaatagagagttctatattcagtgagagaacttgtctcaaaaatgatagtggacctgtgattcataacagcagtggttacctgcacaaaccctgcacagatggggtccatagacatcccgtcagggatggagaagggaccataaagccccacccttgctacaggagccgtagaacatttagctttgcagtggaggcagagtcatattcttcagtggtatagccactggtacattgctcccattccaacagccttgcccacctacgctcattcagacaaacctaatcaaatgcatgaaacacacacacacacacacacacacacacatacacgcacacacacacacacacactcacacacacatacactcacacatacacgcacacacacacacacacacactcacacacacatacactcacacacacatacacgcacacacacacacacacacacatacacgcacacacacacacacacactcacacacacatacactcacacatacacgcacacacacacacacacacacacacacacacacacacaccacagatattttgctattaggaaagattgttgaggtggctttcattctatgctgtcttatctgtgccagtcatggtcctcgtatggtctgggaatgtgaacgttaagatctgatcacaaagcaggcaagtgacaaggacctaggacgagagtattggggctcccagcttgaacaaaggatgttatcctgaccccaagatcagtgcaacttggaatatagatgtcatgccatggccactgatttactcttcccactgaaagtctgaaatcgctgcacgggctgagactgtgtgcagctgtgcctgaccatgtgttctcttgggatacttcaatggagcagagttcatatggaagggaattgctcagacacaagcaatgagttcagaagacactgtgcatccaagacaacttctgaacttggaccttggttagttgcctttgccgcattggacctgtcactcacaagagctagttttaagacagaggaatttggtctatagataaccctattgccttatcaggctcctgtcagctagctcttgttgacatccgcaatagtgtctgagaggctctgccagtgcctgacaaatacagaggtggatgctcacagtcatccattggatgaaccacagggtccccaatgaaggagctagagaaaggggtttgtagccccataagaggaacatcaatatgaactaaccagtaccccccagagctcccttggactaaaccaccaaccaaagaaaacacatgatgggactcatggttctagctgcatatgtagcagagaatggcctagtcggtcatcaatgggagaagaggccctctaggtcctgtgaaggttctatgccccactataggggaatgccagggccaggaagcaggagtgggtgggttggggagcagggggagggggagaggggataggagattttcggaggggaaactaggaaagggaataacatttgaaatataagtaaagaaactatgtaaaaaatctacaagtatggaaaaaataataatggggggaaaaagataacctatcgcccacattcgctcttcttttctggatcttcgatttttgagagcccacaactaagtcacattctatcaagtctacaatgaagatatcactttacagcaaggaaagcagatgttgttagtcagaggtgttctctagaccctaccactcactaaggagctattagcagtttatagctaatggcagacggagaaccattcttctttgagggtgtgatcattagcgggtatcccatggttcagtggatggtcccacatccatgaaagtatgaacagcactaattagacatagtgagttattaaaaaaaaaaaagagtagtagttgggaggggtgtgatgagaggatatggagagagctgaagggagttatgggaattaggaggcgtatatagatctcgggtctcttcctagctcaccaaatgatcactgtcctcttgtctcttcttcaggcagatgctagactggcaggaggtagtctccaggcccccttcattccctggcagttggtgattttcgagtcctggtgatgcatgctgtggcagcagggtgccatttctgggatgactgtgtgttttgttcccttaatggggacctcagcagcagtcctgtttggcatcagctggactgtgtcagcacaatgagactgattggctgagcatcaaaagcagaccctagagagagattgattctgacagggaaataattaaagggggaaattggtgccttgcatggtaagacatctgcacacttgcgatgctcttggtcaagtctccagcacaatatgtgctttaatgagtatagacagaaatgcccaaggttaaagccattcatgaaattaaaataataataataataataattaaaaaagaacagacatatacagattatgcatagacaagaaaaccatcttttaatttttaaaagactaattcatcataaattttacatttggagccaagtgctttgttggaaaattagttaggcttcaatttaaatgttatgcaaatacacgagcagcctgaagcagttggcaaggattgctcccacttctccaacacctcgtgccaacattttcttctgcattggtccttttgctccgatctgtcttgtattttctactttaatatgtccccgtgcttttttagccgtttaaaaataggaacacttccatgattcagccaagccctgacttgacatctatgaagatggtaccaagtggtaccaagtggatccaatctcttagtatcagtgagaacactgaagactcctgaacatcagccctgttggtggatctgtgccatcatcaacctcagcctctagcacttcatcctccatgtggaagtggttgctgcctctggtgttttccaacctgtccatccagattcaagcaagctgttcttggcatcagcctctatcatctgaggacagggcagccctaggaagccacatcctaggtccagctgttttcctctgcatcccctttcctcatgatgcacagaaacctcggttccttctaatctgtgaatcctgatccttttgttcctgtccctccacatccaacatcctttgaaaacccaagatggtcatgttgtcacttcttggcagctccacgcttaatattggtcacaaggccaggaactgatatgtgttattagctcaaaatatcaacttgtcaagatatctgggccagaaagaatgtgttaggaatttccctcattcttgcttttggatgctgtaattgtcctttcacatcctcgctctttctccttttagatcgtggggaactataaactatataaaaattaaccatggtaaccatacttccactggtatgagacattcacactagtgactcagcaccatctgtctccagcgccctttatgttcccaaactcacattctagttccactaaatattgcatgtctttgctcctaccttccaactcttctgtctctagcatttgactactccgagtaccgggtatacctggaatgatgcaatatttgttcttgtgtgactggcttaagttgctcaagattcaaccatgtcagtagcacatgtcacaacggattcccctttggaaggctgaatatccacccatgaatatgcatagttatgaatatttatagtattagtgcatttacatatttatgtatatgcatattgccaccagaatagctgactcatctctcagtggacactgggttgcttccatttttcatcagtgataaatgacattgctattaatatcagtatacaatcaaaatctttcttaattacatgaaggctttagttaaaaagaaatgttacagagctgttcgaatagacatttgcgatcatggctcagctttgcctgttaaggatggatggcacagtcctacttgacagataaagtcaaggtttcctgtggctctccatttcctttcaatcctgattcttctgtagtcacaattcatttcttttagcaaccgaatgttccagtgtatgctgcttcattagggttgctgatccaaaaataagaataaaatgttttatgcatttttttgcaagaggcagataacataaagttgggtgaggtagacaaacagacagatgatagatagatagatagatagatagatagatagatagatagatgacctaatgttagctgggtagagaggtgggaacaatctgcaaggaggtgggggagaggaaaatatgaacaaatatattgtatggcaaaatttaaataaaaaggggtagagcccatacagtaaaatatgtaaactatggagtaggtgaaagcgaatgaagcaaagaaagaaacgtcatctacaattatataaaaatataacatagaagtgtttcctcgtggaattttttttttttttggcaaattcattaaatccccaattcttgcttattgattcagtcacgctaccaagtacagactctagattctggtgttttagacctggaagccctcttggtgacagcttgtcttaactccttcatgtgtaataaaaaggtctgggcggttatcaagatttgtttttattctgttcatctattcagcattcaactacctgtatcaagctgtgcttagcaggctgtctttgttcctggtcttacagtggtccccccctcccacccctacccctgttcagcaaaggggaaaaaagcaaaagcattgaaatgcaacaggccagtaagagaaatactgagttataaagaaaaagaggacactcatattcagggcatgcaagcaggctttgagggaagatgtgtgcataccgtggctgataagtacctatgtgagaggtattgagggtcgggggtggggtggggtggggtggagggagttacggattacatctgttagaggaaaatgaaagatttcctgccagagtatttcctgtggcaagcctccaaggaagtgcatgtcctccatagcagaaatgagaaaactcggggcgaggggtgggcgtgggagggaagcatgttctcgggaagtaaaggggtgcttgacaaagacgtatgtggaggaaggcttacgtggcttcctgaagccacagagtcggtcctggttacaccataggatcctcagttacagcacctgaaccttaacgtatcctgtcatgctcagttattctgagaagcaaaggaaacagtctgtagatgtgaagttcccgggcgctggaccacagtgacgctccataagcattaacagtgttagcaacctttgtattgcaaagaagttttccatgcaggttgaggtaaactgaaaagaattctgcagaaagtgtatagcattaggaggttgtacctaaacagaacacacacacacacacacacacacacacacacacacacacacacgcacgtgcgcacagtgtagcttgattggaatggcagaaagcaggagattgagtacatttacttgtgcgcttgttactgttgcatagccatgactcaaacacccgagagaccaacccaatggaagactggttttgacccatgacttctgcaggttcagtcgagtgtcctcagccccatcagttctgcgcctgcgcccaggtccatcatcttggcagggcggagctggaagaggaggagcttaacctcatgatggacaggaagcagtgaacctaaagggaactacaggacagaactgggataacttttaaagcacacctgctgaggaacctattagtcaaaacacgagtttgagagggacagtctcgggagataactgacatctggactggtgacatgtgagccaagaaagccgtataaaatctgacaaaatgggggatgggagagactatggtgggaggaggaagaaaaggcaaagatgaacgtcgagaaccctggttagagcctgggacacactgaaaggtaaagcatgggtcgaggtgacaacggtttctaagtctaagagaccagtgagagccaggatattaggcccacagtgggtcacatggtacagatggtcagacaaggtgatgcgtagggaaacagcgtgtgcactttgtggtggtgaggtcacttcctggcgaatttggatgagtagatggtataggcagacaccatcgtagaaatgctctactggcactgagattggtcgtgagttgggagagggattcatagaatgagaaggggttcgctggatgttattcttttttcttaacatcattggacctcattatgtttttaagtgcagaagaaggtgacgatcgatgagctacagatatttgctgtgagaaattagccagaggagattagagttaagagctaagtcaggaagcgtaaccttggaaggaaatggacaaatccttcacctcagagtacaggaaaacagcccagatgctgtgaagacacaggctggagaagggaaaagtcacaggctacagtttaacctcagtatcagcttcaggacaagcggcagacatcctagtttcattccaaagcttcaaccaacattgtgaccaaaaccagcttagtggggaggggttatttcagcttacagtccatcttcaacagaggtcaaagcaggaacttaaggcaggcctgcttgctaatctatacaacacttcctccaaccttgaaactactcagcaaatctggtacagcagaaaccatggagggtgctacttgctaatggaatcactcactagctttcttacacacctcaggatccagccgcctaaagccatggttttcaaccttcctaacgatgcaaccctttaacaccatccctcgtgttctgctgacccaggaccataaaactattttcgttgctactgtataacttatgaatcataacataaatttccatgttttcctatggtcttaggcaacctctgtgaaaggattgtttgatttccaggttgggaaattgtggctggcctaagggacagtgctggtttcagtgggctggattctcctatattaattaacaatcaagataatctgccacagatgctctcaggccaacttgatagagccagttccactctctgatgaccctaggctgtgtcaagttgacgatatatcaggaaacgagactatgtgcttagacacaaaattcaagccctgtgtggcaaagcagaaggcagtaggtcagttagctcttctctgctccagctgtcgcttaagaacagatttaatttatcccatgtaagagatttaatttataaccataaagagacaaatttcagatgtaacacactgtgggtgactttctctatgtgctatgtcttggagccaggtgatctccctcattgtgctgtctagtgtggtgacagtgactactcagaccaaactatggggagcttagccttaaagaattagcggagatagaggagaaaaaaaaagagagagagagagagatggagaagggaatctcagaacatcttaagaacagcttttaggagtcagggaaaggctctgactgaaagcgaaaagactatgtgagccccccatggatgctataacaagcccagggtcttaaagtccagaaatctattctggaaatttcaaagctgtaagttccaaatcagagtcagcaaaaccacgttcctggagtctctagagaagactcagtacctgggttcttccagcttctgtggctactatggctactagccttccttgccttgggcctgtaacattaagctctctgcttccctcttcttctcttcttccctatatgttaatcaaccccccttggcctctctatgaagatctatatgattacctggagggcccatctagacctttcttctagctaaggtaaaattcacagggtccgaagatcttacctttgggagccaagaccaaatatgtgagaaattacattaagtatagggagaactcaatatacatggaaaacccatcagtatatcagatccaacaggaaaaataaaatccaaactgtcagcttctacacagttcatccttacagtggaactgtagagcaattaatgggcgcatgcagtgtgattaacctgtaattaatttagtaaaacaccaagcagaaaagcaactggttgtactcaacaactcacgatgcaatctttgaggcacataactgtgaaatttgttattgagaaggtcaacaaccatgcctcaataattccccagaaaattatcctaattgcaataactgcaaaaatctgaaggagagtttgagaagaaagtatgagagtcacctcgcctcaggctttgcagaaatcccatgaagctgtggtttggtgtcagtacagtgagcaccctgtttaactggcttacagtagctccttttgctgaaatgtttaaaagagtgttttccaaatcacctgtgaaaatatttttcatgccccacaaaatatttggttttaaaaatcggcactccacgctatgcattcagtgtcaagctcttcagtaatcaaggccatcctttcaaatagcacaggaagttgacatttctccagcctgagctacacacaccatggttcatggtcaagcagtgagttttcaaccctgcaaacaagccagacttgtatgagattcaggaatgtatgaaagagggaagtctatttctacaaacacgttttgcttactcaaaacgtccttgacacacagggtgctctcttccctgcagcccaccagaggaaagctgatgatttcccttctcttgaactgtacgtgtctgtgaaggtggttgcgtgaatgttctcaacaacttagctttgttctatgagttgttagccttcttttgagtagcatccccttgacccccgaatgccttacctgcttctcatagcagtgtgattgtctaggttttgctcatggcacacccaacacacaacctctcaatggagccttgttctgtctttggctggctggaagggtctctcagttacacagaattcatttctcccttagcttctagcttaatttatcccatttggggagacccaccctatatgaaactctctttaaggcttagccttaagtttctgaaggtagaaatgtcccttcctgttatgttttgtatagaccaactggcccagagctcttccttcatctagtactgataaggaccagccttggcttggagaggggttcctgagagaaggagtgtctgggaatggtgaaacaatgacttaaagtcaattcatgagttacagtcctatgctctgcttcggacagctttccagactgcactctgtgttgtgctctttcaagtcagctttctcttgctattctaaaaactctctggatagctcatctcttgcagatcaaaagcccagtttttttatttcacaatatcaattcaatcattacctcacttccccttttgattatcccatgaatcaacatccccacatgccaggccctagattcctagaaagatacagcacacacaagtataaacaataagatagttggatgagaccccaccctgaaattaccattccaacaatgcttggatctaaattagctctgtcccaggctgacctgcctttgtaagcataaacaaaaaaatttagctggtgggctcttgccttgtgacccacactctctaaatctccttatctctttccttagtatctttctgacaagctggctcacagtgcagctgcctctgtccctttaggtctgtgaagctccttatacaatgcatattgcatccttatattttgcatacttgagaaattgtatgttttcaaactcatattttcagtattctttcccacagccttaagggctgtctcaaaggtcacaccattctaccattttgctgagacataggcatgctctcacctctcagactggtactgcctctaattatcatggaattgttaaccttggcagagaggacattcctcaaaggagaaagatgaaaacatgtacactgctatacaaacaagcctttcacccacagcaaccatggacactcatgaaggcccatgacctgctggctctgtttcaggggcaagaaccatgtcattctgtcccttgcacatagctaagcaagacttggcttagtatatgtcataagtcccagtccttctgggcctttcctggttataggcatcctaatttcctttccatgtgggttccccatgacaaattccatgtgtacatttgtcccaagcaatggtgaaaagcagatccaggctacattacatctgcagcatacttcctgaccgcagtgtaagatgtcctgggtccatggtatccatttctcacctccctttagaacaggttccagcaggagatctaaaaccccttaaatgaccattctcagttcacacacaatttttcatctctgtcttggacattctgtgtttcctcataatccatcacatttgcttgcaacatttgtagttgacaacctgtcctgtggattactaaggagcccagaaacttggaagagaagtaatgcttagtaatgtggattttcttggagccttaaaaaatataagttgcagaactgccccagttgcctgtttatcatatgaaaagtttctgaacagaatataatgtactttatggaagctcagtgtctaagacatactgtttttccaaaacagtatcctcaaagaatgtagtagaaatgcaggaggcctctataaagcataatttgccagtcaccatcatactttattttctctacataaatacggaagatgttctagaagattactaaacaaagagtctttcttttctaaacaattttgtttgtttgtttgtttgtttgttttttcaagacagggtttctctgtgtagccctgactctcctggaactcactctgtagaccaggctgacctcaaactcagaaatccgcctgcctctgcctcccaagtgctggaattaaaggcatgtgccaccaccgcccggcttctctaaacaatttaaagagcatgatataactggttgattctttttcatttgagtttatgcattttggtggagaaaaaaggcctaaggagactatgagcagtaacccatggattactttgaatcttcattggcagtgggcttgagctcataaatgtggtctatatctgtggaggtgactttgattaagatgaaccctgtactatagttggtggctatggtgatttgaatgagaatggtctccataggcttatatgtttgaatacttggtggaattgtttgggaaggattagtagatgcgaccttgttggaggaggtgtgtcactgggtatatatagacttcgaggtttcaaaagactcaggccatttctgccagctctctgtacctcgtggttgtgtttcaagatgtgagctgtcagctactgctgcagagacatccctgcctgcctgctgtgtgctgccatgttccctgccttgatggtcatggcattcctttgaaactataaactccaaataaacatttattccttctatacttgccttggtaatagtgtcttttcacagcaatagagaagtgactaagacagtggtcctacacacatattttccattgagtcttgtgttgattaaattttggtgtttgctttgtggctttctggtggtgatagtgttttgttgctgtttagctgatatttttgctgtcagtgctagggatagaacacagagcctcttatttggcagctaaccatgctaccactgagttccatctctgccctcattacatacttcgctgccctcaaatgcttgttagtcctagagattcccaggcttctgtgtaaaggaacaggagcgaaatttcactttacctcaggctgtggaaattaccttgttaaattatccattcccaacatcccactgaaaagttaaaaacaaactctcattaccaacttcatagttttcaagaagccagtgaatgtttctagttatctatctgtaaattctatttggctaagtaacattttcttcatcaccaacatttctgtgagtgttttgatttgtttttattttactctcatttccaagtatacattttgaagttcttatatttgccacagaagtgaagaacaagatcattgacagggccttgacactatctgtactctctgaatctagataaatattcaagtaaaatttccccaaatcaaaacagagtatcactctaacatgcctgtggaattggtgacactaactccaggcaaaacacaatctagcatctcttcctagggttttgcctcttcctgaaaattcttataaacagcaccaaataggttttttgttgtttttggttttttgtttgtttttttgttttgttggcttacagaagcacttttgagagatgatgtagtatcaatattctactaatttttaatgctgaccagtattcattgtatggtatagtatattttgtttactgagcagtgaggaacatttgaattgatcctgattgtggtgttataattaatgtgtgtttgatgggtttccattttactggggtgaatacctagaagtccttcattccctgaaatctgtggaaatctgtggggagcctaaaattatcacttttaaataacttcattttgtcttgtcagtgtatacagaatttttttttcttatagatggtattgagttgtttagaagaaggtgtttggctatggattattctggatccatttttcttggaacacactttctgtctctgacttcagagacctatagttggtatgaaagttttatagatagaacattcaatgctgtgacttcttcctgtcattattgtccagtctttattcctttcattaccattttcttccagtcctctctttcttcatggacctttcaccttccagctgccatcatgacaaaactcacttgaggccctgacttaattactgttctaatactgtgaagagttaccatgaccaaggcaacttataaaaacaagctccaggcagtggtggtataggcctttgaccttagcatttgggaggcagagacaggtagatctctgagttgaagaccagtgtgatctacagagtgaattccaggacagtcagggttacacacacacacacacacacacacacacacacacactgtctcaaaacaaaggaaaatggaatcaaccaagcaacaacaacaaaagtacccacaacaaaataaaacaatcaaacaaatcacttaattagaggcttgattagagtttcagaggcatggccatcattctgggtaacatggtggaaggcacatgctactggaacaatagctgaaaacttacatgttaaaatagcaactacaaggtagagagagacagagacattgggggaaggagggagagagagagttaactgggagtgctatagccttttgaaacctcaaaacccaccccatctcctccaataaggccacacctcctaatccttcccaaatagttcaactaactggaacccaaacattcaaatatatgagtctatgggggtattctcattcaaaactcgcaggctgttttccccagaccttatctttgtttattctggcctaggtctttccataagattatatactgatatttgtttatggatttcctggaagattatagcttctcaaattatgttaatgttttattgcccatgttactatttctacttatcgttaaagtagacaacttttcacgtctatttatctgaaacacgttcaaattactgttttaattcttgtgttatttttaagccagaatcacttctttgtctatgtgcaaaatagtaccagcagcaattgaagattgttttttcttttcttttttccaatacttaggcaattgctttctgtcttgtgtttaccataatatctgaaatgaatgacagtgtttctgtctgtattatcctggttgtaaatgaactattttaatgtcatatcttttaaggtgatattttgtcttcggttttgatagaactactatttttgattatctccacatttatttgtaaagaacaaggagtgctgaattgtaatcattcagtatatagttatttggttatccatttgtggctttaagatggttgcatttattttttatgtgtgtgtgccatgtgcatggtcaggtgtgttaagagtgctcactcatgtgtgtgtgtgtgtgtgtgcacacacaatattatgcatctttcttccagtattttctatattaatttttaagacacgatctcttcctgaacccagagatagccaatttggctagaccagctaagcaactagtcccgaggttctacctattttttcctcttccagctctgtggtttcaggcacgtgctaacactgccagctctttactatgttctggggacccagactcagagtcccgtgcttgctcagctgacatgttacccactgaggcatgttctcccagccctaagagagttgtatttttagtaattctgttaagtgtgtatgatatgaggtgttggttcattctgaataatccttgagaaatgatgtttgaaatgatttgaaaatgaatcaagttgttatatgtagtaaattggtttcttgaaaatagcctaattacataaattttctttttcatatttatcttgaaccttttaacgaagattaccctgaagcttttttgaaaggccagcctttaaattggaagctaatgtttttaataggctacaaattataataaaagattacagttcgaccctttttatgggtagttaacacagtatgacagctgtttatttctgccccccggaaaccttttcaaaaagagatatcattctgcgtgctatcattttcttcttgtatcgaagcagatctctcatgtgtggatcattacatttctccactgaacacagtggaaaactacagccacagctacaacaattaaccacttaacacagctacttgttagcttaaccatctcagcatattttctggttcttggatttcagttttgtgaggccataggtaggttatctcaacctacctaggagagaggactgctaacagagcttatagttctgacaccctatctgagctagcttttgtccttgaattttcacttaaactggattaacatgtgcatatcaatgaattaacaggctatagataagcctgtaatatgtacttctaaaacctgctgtggcttgttatactggaccatgggtcacatgagcagagaaagaggccccactgagacattgagtccacccaagaactgattaaggacatctttccccttagaggctcaatatatctcgcctcaattttattcctctatactcccctccattcctctgttcttttcttttctttttttattttcactaaggatgtttgtttgtttatttgtttctgttgtttgggactgtgtgcttgagactgaagccaagactttgcatacattatgcaagcactgatctatcttagtagccccattttttaatattcaaactagtcctttctttccactatagaattaaaaatacttagcaatcaagtgcaacaagtccattttcatcttgagtaagctaattatcaccagtattaatagaactctaaattagtagggtgaggtgttttgttttgttttgtttttgttttgttttgttgtttttaagaaaagattgatattttcaatgttataccttgcatttcttataggattctgtcccatttaagcactttacactagagtcaaaagttgtgtggagaagggtacccaatatagaatgttgttgttttcttttgtatagaaagtcagaaaaaaaaaaagaaaagaaagaaagacctccactgtaagagtggaggaagctacataaagtatgggaactccagattgtctaactttaaaaaataacaaatattgctattttgaggtttaaaaagtcttgcaagtcatattattaaatgattaaatgcaaaagaaagcaagtaaaagcaggacatggatttcaggatgttgtttatgatcacccaggaaactgctgtgtctatatacagttatgtgcatgtcaggaaatgccaggtcaaatcctggaaggattcaggcaaagccattttcaaagcctccctctaaagagaaagaaggagtggaggacaagagcaaatacagaggctgtcgtatttattctctgttttagtcattatactccaagccatatgtagacaccatacagcactgtcgcacatcatgtacacaagatacacagcaagcacagaaaagggaaatgtcattcgcatcctattaaccatgcagttcagtcaatttaacagtaatatttgctcaattataccacgataagaatgaccccaaagagaatcaaaatgcctgtctctaaaggaacttgtttgttgttgtcgtttgattatttttaatcccaaaaataaaatttggatatattcgtggtatgtaatgtgacagtctagatatatgacatccatgacacacaacatgggatggccaagtcatggtaatacgttggcaaatgccttcaactctagctatggaaggctgggaagagtatgaatttcagactctgtctcaaaagcaaagtatgatgcatatgtgatataccacatgtgcaaatacttcacataattatcatcttgtgacaaatgcatttgaaatattttcaaattatgtaaaacattttatttaactgaagttatcatttgaactcattccatgctactcttattttgttttaacaaggggacttttagacttgcagtcaagtttatgataaaacaaagtatttaacgtaggcttcttggtcctagactttcacatgacacccacgaaacaatgatctcattttctctcagagtcactcttatacattttcattaccaaatcttctgagtcaaacaggtaaccagtaataaaaatgacgagattcagaattcttaaaatataaatatgcatgcatatacagcattaatgccaagttcaatattctatagtatgcagaaatgtattcacagctctttcactttggattcaaataaatggttttttaatagccttgttcctgtgccgggagaaaggtcagtcccccagtcatatcccaggatgactaatgtaaagataatgtcaataagtatctgaaggcaatcaaagaaatgcttacttaaggaaaatttaaactagaaaaaaatcatataaaaagtacatgtttctgttttacataactaaaataggaggaaatacattactaaacttatattagtctaatctaatgcttgttagtttaaattgccaatttgacacaatctagagttacctgagaagaaagcctacactctgttggcctgtaggcatgtccatgggaggactgttttgattgttaattgatgtaggaagacccaggtgactgtgggcagcatcatcgtttaagctccggatactagactatgtaataataaagaaagctagctgagcataagaaagcaagcaaaaaggatctgatctagagtttgtttctctctgctcttaactgaatgtgatgtagcaagctttttgaatttcatgccttgatttctgctgaatgacaggcctggaattataagccaataaacactactgctcctaacccaagtggctttttgtgagggcacttgtcagtgaagaagcaatgaactagaataatagtctatttttttttgttttttgtttgtttgtttgtttgtttgttttttcgaaacagggtttctctatatatccctggctgtcctggaactcactctgtagaccaggctggcctagaactcagaaatctgcctgcctctgcctcccaagtgctgggggattaaaggcgtgagccaccacgcccaacatgaactaaaataatagtctatttttataccttgttttagggaacaaatgatttggaatttatacttttaattaacatgcagggtcagttatgagtatagggttctgtacatggtctagtctttctctaaattacttttatataaaatcaaagataataagtattatccaatggacccaacctcatgatcagtatcaagcaacaggaaaagtatttgtttttctctgaatctgatctcagtgtttaattggaaacaaagctaaagttgtcacacatacaagcaacttaaatttagtgttaagaaattttatgcactggtgaatttatgttaggatcaactggaaattcaagtggtgatgtaggattggcagatgccacctagggaaacagaaaatagaagcatacatcattaagaataaatttatatattcctatcaccactggttcatgtaaggtgaaagacctatataggtttctgaaattcagtctatctatcatggaagctttaagagccatttataaataagttcatcctggcttagaaaaatgatagatttcctaatgagagaagagtgtttggctgggtactctgtgagtctttctctgggtaagctgattggggaatgaatgtataagatagatagatgatagatagataggtagatagatagatagatagatagatagatagatagatagatagaaagaatagatgatctatacatatatatacatatattaattatatatacaaacatagatacgtagatgtattatatatacatagatatatatggattatgcatacataggttatatgcacatacacacatatacacataataaatagatggattactcatatacacatacttaaatggattatatatttacatacacacatatgtaactcattttgtactagtacttatttactctttcagccaatagttgctatgtatcctctctttgccagccagtatgctaaggacttgatccattcattattattccacttttcctcctgttaattaaccattaagcctactaccaattcttatcacagtggtgcctactactacagataaccatagagtgttgatggtataattacccttatcggtcttgaatgtggaattatgaaagagaggtctctctcccttctcagcacttcccaacatgagagagagagttctgagcgtctcacattatatgccaatgtgcaaggatgaaccaaggtgtgctcctctcctccacccttcttttgcctttcctcttcctaaactgatcaattacaacatcttgaatagtctctgattggtgaaattgagcaaaagaagatgggcttctttaatttttgttattccattgatttagtgtgtgtgtgtgtgtgtgtgtgtacatgtatgtacacatgcatgctcacaagtgccatggcatgtttgtggaggtcaggagacactacaacttacagaaatcagtcctttccttccatcttgtgggtcccagtgatcaaactcaggtcatcatgcttgcctacaaatgtttttactttccaagatcaactccttaaagttttactttgttttgttttgttttgttttctcatatgtagcatcaaagaaaattagagaggctttcactgatgacggcaatcatccttcactgtcatcttcattgggcatttattggtatttggtgcttgctctacccaaagacctttgtatgagcattatagaaaattctcaaagaaaatactattatcctctttgagtgaatgaaggaaaatggaggtggaaagtgtaggtccagaggcctacctcaaataactgacagagcccaggtgtccagcactgtaagccatgttccagatgcccaaattaccgaatgctattttgatatctgttgcatatatgtttttatgcccagtccaatatgcatgtatatgtacatataaaatacccaaacctaaactcactccaacttcagtgcatttcaaaagaaaatctacacagccttctttgcagcattcgagattagcgacacccttgagaatgaggttctatccacctacacaccaagcccctgtaaccatagaagcatagaaggatagcacagactaaaatgctgtgtgcaaggcaatataaagtcaaatccataaagtctgactcaacactggggagccatgtatccgaatgagtcaggaaatacctcgtgggcatggcaccctgactgcagctctactgtcttctgtaatgaccccaattccgtacattgcctgttaaaggctcttaccactgttacattagacccatgtaacaacataaattgggttggggagagtatagagggcattcagatcataatattatgaagaaaaaaagcatgcatggttttactgattgaaagattatgcactcactaattgcttttctgataatcacattaactttcactctgaaaaattaccttctccgacttcctaaattgcagccaatgtctacttatccccaaggtgcatgtgggaaaacattgaaagagaaaggtcagtgactctctgcttcattttctccaccacttccacagtcacgatgtctagaccagtttctcaggatgtttcaagaatgggttcggcttactctgtactatttatttggtcctgaggcttcgctccttaatatttactaagacaagtctttcatcgacactggttatgtaaagaagacagacaaatatgctcaatcgaaagtagattcttagtgtgccctgacaggcctggtaccttctctcttctggccactctcaggatcttatgcatcagaagaggataactcactccaaaaggtacctgcgagtaatggtacgcatgctctgcgctttctccctgagcgatccctgccggcgaagttcacactgacctcagaaacttgctaggtaaatccctttgatgtggccagcagtttggtctctttagacatagtcattgcgaccagagttcaaatgagaccagagacaaacgtttgaaacacaatactgaaaagaggttgcagctttcaattattttgaaagcatgttctctgttggggtaaagagtcagaagcccatactgggttgtgaacaaggacgcagaaagcagaggcagaaggttttctgtgagactctgtggggcaggcagtgttttgtgagattgtgggtatcttttatctactgaagttttcatgtacctggcaattctgtagtgcaagaaagttagagtctcattgatgtccatttaaaatgtcccatggtctatgtaatagctatggggtctatccaatcacaattatatatttcttcacttgaaagacacttaaaggccaggcatggtggtgagaacctgtaattccagcactgggggagtggaggcaggaggatcaggagttcaaagccagtcttagctacatagtgagttcaaggccagcctgggctacatgaggctcagtctcaaaagcaaacaaatggcagatgggtaaaagtggaaaaccagactaaacaatgactgaaaagtttgagaatgtactgatttctaacagtgtcaattactatagtggcaaattatgattattacatatctaatttatgatacattcaattaaatcttttatattctctcaggaaacatttaagaaaaaaatttcaacttttagtttctcccaggcttataaacctaaaagaacacatgtaatttaaaggtatcttttatttctgcaaatgctgataaagtgacacttttgataatgctctcgctaataaatccattctcttagaactagaggaaaaaaacaacaacaacaacaacaactttgttttgcagctgaaaaacattccaaattgcagaaccaaaaagaaaacagagattcagtgatttttcaccccacggatttacccatgtgacttcacttcctgcctggtgactatggccaacacttgtaaattgcccacctaacacacagtctttttgcctgatgagagaaacccatttttattggataagacatcgtgcccaagcaaatactccatggcatagctctgctgtggccagtttgggtcaatgaaacattagcaccctttaacacggtcagcacaggcttcattgctttttcttcttccttctttcctggaacatggaggtgataactgaggatacagcagccaacctacatgagcaaaatatgatggtagatacccaggatggcagaacatcaggatacccaggagtctagaatgggggtcatatagtaggcccttccgagatgttctaatctgcctgtgagtcaacctcaattaagaaaatgtgtttataatattggtctgtaggccagcctgtagagcattttcttgttattaattgatggaagaggattcatcccactgtgggtagtaccatccctggactactggtccaggtttccataaggaggcaagctgagcaagccattaggaacaagccagtaagcagcactcctccatggcctctgcatcagcttctgcctccaggttcctgccctgtttgagttcctgttatagcttccttcaatgatgaactacaatgtggaagagtaaaccaaataaacacttttcttctcaacttgcttttcagtcatagtgtttcatcacagaaagaaaaaccctaagacaagttggtactagcatagtggctggggtattgctgtggtagacatgaccatgttttgggtaggattatggaaagattttagaagtttgggctagcaacccctccagtgttgagagctcagtgggatgttctttgggagctgggaagttatgaatgtcgagagctggaaagtgctggccacaccttccataccagcacacaaaggcagagcaggtgtatctctgagtttgaagccagtctacagagtgagttccatgaaagttgggatacacagagagaccttgccttgaagagaagaagaagaaggaggaggaggaggaggaggaggaggaggaggaggaggaggaggaggaggaggaggaggaggaggaggaggaggaggaggaggaggaatgttgagagcagtagattatacagaagatggagacctggcttgtgaaatttcagagggaagcttaaaaacaccatcagagtcatttgctgttttgaagtaaaattctgccattctggttgaatggggctgtagaatcagatgcattttgtttttaatctcatcaaactaaaagcagaacactctgctatcttgagtgaacatcaggtttatatctggcaagttctctaagctctgtccatgacaagggttttctatgcaggtgcagaaatggcactctgcacacagtacaatatactcctactctgggcaccaatgagttttgccaggcatcttttgcttttctctatttcactaacctgtttttatagggagagttaagtataaacaaacattacattaggtgatgggtcaaagaagatggccaacaatcaagatatttaacagtagaaccaataagttgaatcagcagataacgattcctgctgctgaacctgaagaccactgtttggtccttaggagcccataatagaagaagagaattaattcttgcaaacaggcagattaactcccccacatgtactctgtggcacacacacacacacactaagtttttagaacatgttattggtttgtgtgtgtgtgtgtgtgagtttcacatcatgtgcccagttccactcatctcccctgcccctcatacccaccctccaccattgcaacctccctgccaagagagagaggggggagggagagggagagggagagtgggggggagagggagagggagagggagagggagagggagagggagagggagagggagagggagagggagagggagagggagagggagagggagagggagagggagagggagagggagagggagagggagagagaatcctgttgtggaagctgtagtgtgtcacaatgtgtcccacagtgtacccttttgtccatacttccttgcttgcaaatgttcatcgcagtgactcactggtctggtatgaggccgctggcttctgctactctattaatactggaatctcactgggactcctctcagatctcctgttgttgccccgtctcatggagatcttgtagttttagatctgtaagacatgcccctccatgcactccagtactcgttgatggaatagacgttggggtgtgtcagttcaaagccctggatctgggcctgagagatatctgagtctgtcaacccatcagctctctggcatccacaccactgggacaaactctcctgcaatgctacaaccagcaaggggcagagccagctcttccattctcatgcctttccattctcccaccctcatgacctctgagtcagctccccatcctgtcataggtagagagggataagaaagggaaggagggcatctctccctcatccatgcctctgaggggcagacaaaaggcaaagccaactcttctgtgctcacatccttggggctggctcacctggtaatcccacatccaaggccagccacactgtgctgcctgggcaaggctcaggacctgatcttcagtgctgagtgctgttgtagtgagctctgataaactgatggctagctctccagcctgccttaggtggcaaggggtgaagggaactctccctccctcgctcgtgtcaccacacagcagaaaagtggtgggaacaactctcccacactcacactggcttgcgagagccccattccccaagtcagctctacagtgctgcaacgaacagggttctgagtgctgcagctggtgaggggtggggccagctctcctgccagctgcaggtggtaagaggcaaggggagaggagggtatctctcccttgcctatgctaacgggagacaagtggcagagctagctctctgaagcactaaagctgcctagaggtgtggacagctatcctgcaggcatgtccttaggccagctctcccctgattcccaggtgtgggctggggccagttctgtatagccctcagacatcaaagtgttttcagttggcatcccagaccaggaatgccctcaggtggcagcccagaccaagggtgcacacctggcctttggtggtaactgaaccctgctactgtagggtcatgacccaggtatgtcctctgttggtttcacaggccaggaccccaccatagtcccagttagcatcaccagctactcacataagactgttcctcacttccctccagttttgcctctctccattgtgcctacatcctgagtgtctaggctcgtcttagcagtgggttcaggagtgctatggcctacttgtgaagtagggctccagtcaggcttgtctaaggcatggtctgctccccaagggttgtgtggaactctgacttgtggtcaattctggctagcttcctatcagggccccatgtcaccagactaaaggttgtctcaggctcactccttgcatggacctatcaccgtatccccataggagggctatctgtctcaggctcactcctgcctgaggtcatgtcccagacctggttcttctagtctccagcacattccccaccctggaagcctagccaggctgtgctacaatggactggtggtcatctcatgctaactccctgcccagaggtcccctggtgttggcctggtggtcatctcaggctagctccctgctcagagggcccctggtgctggcttggtagtcacctcaggcttgcttttttttttttttttttttagggaatgtgaggttactaatcattcagatgttcacaggtcaggacactgagcatagacacagcctctctcctctctgccacctgctgacacatatgcaacagagcagccacaactgcaatgctggtaggggcaggcacacacttattttttaaaagtaagacaaaagcatttaatggtgatgacatacttggtttaaatacttgtttatctgtataatctctctctctctctttttctatccctgttcctcaacccaacaccagtcctccttacctgaaatactagtgggtaaacattgccttgtagaaatagcagcttctaatatttactttcctattcttctagctctacttcctgatagaagtaagggatgctttctgttctttgggatggtatgtgctacttttctgttatgactaaaaatatctgaacaatcaaactataagaaaaaattaatttagcttacagttttagggatttcagtgcatggcttattgacaacattgtttgggacctgtgaggaaatacatcctagtgggagtgtatgtttgaataaatgtaatctcttggcagcaggtaagcaaagagagaacgaggaagagccagagaccagtgtcccttcaaggacacaatcctagtgagttatcttcctcccacttggttgcaccttgtaaaaattctactgcatccccaaaatctctatggaacccgacttcaccaaatgaaacttaggaccattccagttccaaactatagcaaaaggctaaagatgattaagattaggcaggtgttctgaaggagaggaagaaaggattcaacctttggaggccttaggaaagtgagtttgcaaaaccaagacccagagaaggtggtaggtctgcatcctatgagtactttgtagagttggtatgacttctgagagttgaccatataagatccctatggaagatgttccctcaatatataaatactccagccttatcagagacttccagacccaagtgtagcaacaagggtctctatggctgaagacaaacatagaaatggttagtagtgggttgtgtttgtaccagtgactggggctccttcagaacttctgggcctagaaacatcctagagccttgcccaacaggaatattctcaatgaaggaaaatggcaactgagtctacagttcctgccagcccaaaggtccgagtcaaatttaagttgagagagagagatgtaaacatttctgccaatctactatgttgtttataaaggaaatgaacaattgcatacaaatcttacagtaatgatataatgacacctgggccctgctacattttttagctttcttaacataccttagaatttaggttggtcaaagatgatttagaagaaaggctgtctttaccttgaaaatagacttgtagtgttctactgctcactggacagctgagtaagattatcccttgttagaaggctgctgatgttactacctcaagacgcagaatcctggcttcattgtttccataatggcaagtcattcagtaaaccattcctgaatgttcctgtacagattaacaactgaacattcatttagcaagtctgtaggtcatactcgtactgatatgataaatccttaggtagcaagaatctgtgttgcatgtgggggtttctagctgactgggaaaataggaaacaaatacatttgccagcaaatataatgaattgcatagttgtgaattgagagtttcaatgatagaaggcagaaagtgagaacaaaattgattcttcctactacaaataatgttttctatcgattaaatgaaatgcactaaagtgaattgaaacagagcagccacagaagttaattggatctgttgctgtctctagtattcacaatgaaaccagaaaaagaaagaaaatagtggccttgaatcgagtcacggttcttttaaagtcaaactatgtacatgtggcatctgtgtataaacgtctaattgtttttcatcaatgggcatttccatttaagccaaacccatttcggaggcaaagtaatttattttaattaagtttgttgggaacaattagtaattttcacgtaattgagttagaagtgaaatgaaatccaattttggaaaagttcttgttggcttcctagtaagcaagaatgtggtttgtttgctgcaagctggggacactggcctatttagtgtccagtaggttattcaccaacatcagctctccttatccactccctggtaatggttaccaatatctcaaatcaccaactggatgttagtacaactccatctcttaactccaagaacgagttcaatgaatataaaataggggtgtatatggaaagaaccagccaaacctctcagatatgacagcattttcaaggcattccaagccttcaggattgtcccttggccatttgtacagatcatgaccagtatttcctgggtgagagttcaggaatgtacatggctaagggcccaattaggtcatgtcacttgaaactgtctctgaacagtttgtgccttagagacaaacctgttaatcactgaaataataatcttcacataaaagaaatgaaaaattatgtcagctagaaaagagctggaaaggctggggctataatagctcagtaataaggaagggctgagggtgacccccaattcaccactaccaccacacctccccaacaatgaaaacaaagaaaatgaaggaagttgaatttatacactatgattcgaatctttttggtgtcacatttaactggggctcttggaaactggaaccaaaggtctcattgcaaagagagaaacacgaagctggtgagttttcatccaggctttgtatatggccctacaacacataaacaaagattaatttcagtactgtagaattcacttggtgagtgtagggatactggagcctcatgaaagatgatcacagcagcatgaatgcagggctccagtgggatttatcccttccttgtcctcctgcagaggaatggcccatgcgttattattgtcactatcgctcttgagtttcagtcacatgagtttgaggttgatcattaaacttaggcgaaatacgttctttgaaatataagaggaatttttatattatcccatcttggcagccacatcaaagacagaaaaatgcagaactcaacgatttcctcaggtaatatctaacctaagcttccatagggggaggtgggaggtgtacaaggtaggctgggcagagcaaggccaacaagtcacctggtgcgaaggaatatcggctcctatgaagctcttcttcctaggcttggtatctaccgccctcttcctatgatagacttcatttactcccaccaagtaaccttctgtcatcagtaagtctttaatttatatgtctgccctaatttttatgctttgtagaagtcatgaatcaagtatcgccaagcaactcacagaccaagtttctgagacacagctgtaagtctctttctttgacttgaatgctgagttgaggaagaaattccgcactggacgtggtcttgcttatatcaaaaagtggctcgttgggagcaggagatttttctccagcctgaggtgttctttcacccttccgttccatgccagttttttaccattatgagaacaatgacttcattctctccagttgataacaataatgacacactttttataacttgaaaaggcctctgcttattgatatggaggttaaaattaactataacacaggagtctcccattgcatacctcaccttatcttgtggagcaaaaatgaggaagacagaaaacatgtccagctcgtggctgattggggctttgtcagtgctaatctgtgctcctggagaagcctttattgtctctttaagctcgtgtcacagctagctaagctacattttgttgaacagagtctagctaaatggaacaatcacagtaaaacaggtaaaaggaaaaaagactgtgccaaaggggtcttgacatttaattcacagtaacatttgataggctaataaatgtgaaaactaacaactgatctttatctctcagaggcagcacatatcttttagttacagccctcaactgcattttctgtgctgaattctgactaaaatccacaagaacaatagtatttaaattagtttaagcgaggatgataacttgagttttggaccctggtataataagaagtttgaaaatgagaatgtaatcttatttggtcatgctagtgtttatgaatctaacccctatcttctattaaaaataaataaataaacaaaccctgtatttgaaaaatcacctctgtccaaacagaaaagaaagtaacacattttacacgtggacttctacatatgaattagctgccagtgtggtgggttttcagataatggtggatcctatcacgaaaggataatagagagactttgcatcttattgcaattgtctgagctcttatcgctctcctcaacttaattaacacaacctcctaggactgtacattatttttaatctctgtttttcaaccactgttttgggcagattgttgtcgaatacaggcgttctccatcaaggtttattgttattcagattatacacagtgtttaaagaggaatctctcattattgctagccttgcctagtgctcttttttaaaaatgtgtagtgcctctaatgtgtaaacacagatgttatgtggaaggattggccatttattctaatcgtgaactattgcatagtaagattcattaatccacaggagagcttttggccattctgtctcaccccactgcttgcctggtgtgtatgaggttatctccttaaaagtagcatcatgcatttaacttcacatatttttactacagtgccttgtcaggggaaaacaggagtagggtctgagggtgatgaaaggcaggaggaagaagagatagcttccccgcatgctttccaggctgaaaaagattcatcacaaggtcaagccatctgagaaataataagtgtttcttgcacactgtggatgaaggatgcggatatggataccccatgctgcctccaatagctaaggattcagtaagagagagaggactgctcgctcacaaatgttcatgtggaaggtcagctggtactccagtcgtgggaggaatctgtaggcactctgtgttaagccagaagatttccccttgggaagttctgctgccatggcagcgagctgaggtcccatttcgtgacctttcaatgaaggctttgtactgtaatgaaagatccgcaaaatgagattcatgatatcacttttatgcatatgaccactcagtggctgatgatgaaggctctgggtaaccctgattttacacgatctggcctcttcgggcctcgtttgtagtccctgcccggtttccattcacctccatgttgccattgcaccgaacatttctctagcctcattccttgtatagccacaattttctgctcaatttttacgtttatggaaattatgttcctttccacactctgtagccaaataatcatggtaatttcaattctctggtctccactgccagaatctgactcatgccaccaccaaccctctttcaggctacagccatcccgccctgcttcaaatcaccgccctgttatccagtctctgccacacagcgggcgaagcattctgtatcagggacaaatcagatctgttttcactccaagaaggaaattcagattcctgtgtttgacctccgcatcattgcctgctgccttagctctgcttcccgatgctgattacgggcctgattcttgttctgcgtcccacaagcacctcttttgggtctaacagatacactctttctgatctcagggactctggcgcatcccatctgctctaaagattcttctccagcatgtcctcagggctcctccactcagtgagaccttggaattaatgttgtacctttgggaggcctcatctaaccaggtagactgttaccacactagctcagcctctgctagttaccctccagcacactctattgtttctccgacttttctcttagctgcaattattgatacctagtttgtttactctattatctttctctggaaacatcgaaaggaaaaactctcccccatccaatgcctagtatcttctggatctcacacactcaacagctgtctccttatccatgagccagttttcttcctcttcttgttcttcatctgctcagcgtttttctctgcgatcctatttcacattcagtatggaaagtttcccagaatttaataatgcttataaaaactgccattgaccttttatttatggtggaccttcaagcaacctccaaagggagaaaaaaaaagttgataaatgatgagaggtcccttagcatatggttaaatatttactgactagatgtcatttcccctctctgtcatctttctgcgtggctaacagtatttgctgctttactggctcattatctgtgagcacctgttcttggaaataacagccaaaagtaccttaggttttgttgagttgccatctttcttttcacctctagtcccctcccctcatcctcgtggttctatttactccctatagtttatgggctacccttgtctcaggtactagcaatacaaaggggattttaaaatggaaggcaacctctagcctatctatcagagatgattgacaagtaaaaaaaaaaatctaggatatatatatatatataatctcttgggggtaaaatggccactgaagttgtttgctttccagctatatgaatagcaataaacaacatcccattaacaagttctatttttacagtctttctgaaaatcctattactgccagtactgtattttttaaaagtcttgggagaaacctccttgtagatgataagttgatttattgttttaattataattcactgtcctattttctcatgtttatccccattagtcttcttgggttcaccaaaactatgaattcattataaggtataaatagactcatctcatcagttagaaaaagtttacatttccagaactaataattacttccaagtatcaccagaaagatcgactcctcttgaagtcttcagcattctttggctgtcctgataagaagtagatgacccatgttacaagaaaagaacatgaaaatcattgctttcttttattttggctatttcaccaatacgctgcatgaagctaattaactctttaggtagaattgtctaccgttctgtttatggagtgttttcatcttattcatcacagtggcctgggctgctttacagtccttctgctgtgtctgccttaatggtacccttatgggcttgcctatgacctaacagttttcatgttgaccctggctaaaggcaacttatggacccagaggggaggaaatatgtcacctggaaacccatgcttcccaataagctttaagtagttgatttttccacaggatctttattatcaacacataaaggggaaaatgtaggaagggtcaccatgggaaatatgcatatccaagggtgttttaaatgatagtgctggatcttgggttgtgggcaataatggtagtctctaaagttaagaaaaattcttttttactagatattttcttcatttacatttcaaatgctatcccgaaagtcccctataccctccccttgccctgctccccaaccacttctgcttcctggccctggcgttcccctgtactggggcatatgatctttgcaagaccaagggcctctcctcctaatgatggccgactagaccatcttttgctacgtatgcagctagagacacaacctctgggggtactgattagttcatattgttgttccacctatagggttgcagacccctttagctccttgggtactttctctagctccttcattgggggccctgtgttccatcaaatagatgactgtgagcatccacttctgtatttgccaggcactggcatagcctcacaagagacaggaatatcagggtcctgtcagcaaaatcttgctgacatatgcaatagtatctgggtttggtgaagaactcaagaagctggaccccagaaaatctaataaccctattagtaaaaatggagtacagagtacaaagaattctcaactgaggaatactgaatggctgagaagcacctgaaaaaatgttcaacatctttaatcatgagggaaatgcaaatcacaacaaccctgagattccacctcacaccagtcagaatggctaatatcaaaaatttaggtggcagcagatgctgacgaggatgtggtgaaagaggaacactcctcaattgcttgtgggattgcaagctggtacaataactctagaaatcagtttggcgggtcctcagaaaattggacatagttctaccaaaagatctagcaatacctctcctgggcatatacccagaagatattccaacttgtaataaggacacatgctccactatgtttatagcagccttatttataatagccagaactggaaagaacccagatgtctctcaacagaggaatggatacagaaaatgtggtacatttacataatggagtactactcagctattagcaacaatgaatttatgaaattcttaggcaaatggatggatctggagtatatcatcctgagtgaggtaacccaatcacaaaagaactcacatgatatgcactcactgataagtggatattagcccagaaacttagaatacccaacatacaatttgcaaaacacatgaaactcaagaagaaggaagaccaaagtgtggatatttcattcctccttagaatggggaacaaaatacccatggaaggagttacagaaacacagtggagctgagacagaaggaaggaccatccagagactgccccatccggggatccatcccataaacaaccaccaaacccaggcactgttgcttatgccagtaagattttgctgacaggaccccaatatagcagtctcttgtgaggctatgtcagtgcctgacaaatacagaagtggatgctcacagtcatctattggatggaacataggacccccaatggaagaaatttaattaattaattaaattaaaattaattaattcttaattttgcccagattacaaaaattttacctgtggatatgagagggtgggacaagtatgaagtctgacggaaggaaccaatcacttctattgtacagattccacaagccaaccaatggcatcatgatattaacacataattattttctattttgccacagtttagacttgtatcattaggattttactggaggaagtggaaatccacaggctaaggaacttgacctatagacaatttttagatgctattattgggtctctgtggagaaggctaaaactcaacagagatagtaacatggccagaccaggtgactatgtgggagagagcagagttcaaatccagcctggccatgagtcctatgatctttgtgatgcatgacacttctttttattctaaactaagagcaccctggctaagaactatgagttaagtggcagagacatgcctcagtggttaagagctttgttattcctgtatcgatatccagtagccacatatagtggcccacaactgcttataacttcagctctacaggatcagacacactcttcttgcctcttcaagtgctggcacacacctctgcacatatgttcacacaatcatgcacatatgtgtacacatcaataataagcacttcattaaagtaaatttttaattttaatttttttgaaaatcagtgttttaaaagatgatttaagtggatgttagattaaaagagtagtagaagttaatgtgagacatacactggtttgtatcctcgtgtttacttaactttggttttctttttttttttttaaggagagctaaatgtggacaaacattgcaatgttgcacactgagattcatatttcacttatggttactaagtattgactatgtgcctgcaattacaaaggcacattaaaatgtggtgtgagtcatcctaccaaccaaacaaccaaaaatggtgcctggttgtcttttaatatcaactagaccttactgcaaaagactaagtccaaatggtatcctaatgctgacctggtattattccacatacacctcacttctgcaagccccacagagtgctcaggtatgatgggggctttggtggccttcagacttgtgtgtgctcagtgacttctcgctggagaagacaccaggcttttcatcctgctggagtcctgggtgatttttaccacgcctccatttacccaagaaaaccaggttctctcggtgcgcctgcagaaagtgcttcttgaactgtttgtttttcagaaaaggaaagttgttcccaaatcaatatgcttaaggaaatggaaagcccttgattagcagccaagaggcctcctaatgaaatgacatttccctccagggatttcaagtggttaatggagcctggcgctctctgggtaaagtgcttgtgcttgctctgtgctatgctgagctctgctattataaacaccagtaccccatgaaagtgaccccaaataggcacatttgcatgtgcatgtgtgtctttagacaaaaaaaaaaaaaaaaaaaagaaagaaaaatgtctgtattcatagctgagttctgtggctacaagtacatttactatgtgaacaaactcaaaacagttctccatgagccttcagagagtggtggccagttatcaacctgaaaatactaaatgctcatataatactgaatgcatggaaacaataagattagtactgtgccctggagaattttaagcaggtggttcttggaaagatatacaatctctggttgtttttgtttgtttgtttgttttcctgaaggaagtaaacagaacacggtctatatgatgacaaggtttaaatatgtttataaatatgcaaggacatcattcttggtttttctggtatcttcacattatctctgtgtagaaaatgccttaattttaaagctcaaaatcccatagaaactagcagaaaacatctgaatattgtagaagaattttcttgcatccaaagaaaggcgagagacaatcagagactggcaaattttctctggatggaaattttcaattctttcctttcccctagtctcttcacccacctcggaaatagagacactatctcctaaaagtgactacaggtaaatctgatcatttataatcacagtgtatttcttgactggaactttaaagaggagaatctctttcattcttccttccttccttccttttttctttctttctttctttctttctttctttctttctttctttctttcttccttccttccttcctttcttttctttctttctctctctctctccctccctccctccctccctccctccctccctccctccctcccttatttcttccttccttccttccttccttcctccctccctccctccctccctccctctttctttctttctttctttctttctttctttctttctttctttctttctttctttctttctttcttccttctttccttccttccttccttccttccttccttccttccttcctttctctcttgtttctctcttgttttttttaattagatattttcttcatttacaattcaaatgctatcccaaatttcccttataccctcccctcaccctgctctacagcccacccactccagcttcctgaccctggtagtcccctgtattggcgcatataatctttgcaagaccaagggcctctcctcccaatgatggctgactaggccatcttctgctacatatgcagctagagacacgaactcagggggtactggttagttcatattgctgttcctcctatagggttacagacccccttcagctccttgggtactttctctagctcctctctttatttttttttaaataaaattacaaataggaaaccatgatcttagagatatcttaatgcagacttcttaattactgagaaaatagaggctttctaagtttatcatacctctgaagagcttttttgatacatctatagatgcctacggaggccaggaaatttcatgatctgctggatgctggatgcccagtaaagcagtgtaggtgtcagtctgagtctgaaggcctaagaacaagaggagtgacgtccaagggcagaagacagatgcttccatagaaagaggagaagcgaatccacacttctcctttgctatatcaagtctctgaacagatgggtgctgcccactcacactggcgaggtcctatcttcttcacccagtttactaaatcaagtgctgatctctcttggaaacaccctcacaggcatcttcaaaaagatttaccatccatctgggcatctcttagtccagtcaagtccacctctgaatttaactatcacatgttctgagtataaatacaatggagtgtgacggtctcgagcacaggcagttggaacatgattaatgctactcgaaggagaggaggcaaggcaggtttgttttgttttaaaatataactcatgacatgacatcatcaagtctttcatttatttattcactttacatcaccatgtcagcctcctcttctcctagtaccccctcatgcaagttctctccccattccaccttccccttctcttttgagatggggaagccccctctgggtgtcactcacacacacacacacacacacacacacacacacacacacacacacaccccatgttgctttggaactaggtgcatcttctcccactgaggccagacaagacttccatttagggttgtgggatccacagacagacaagcaacaggctcagagacagccctccttccagttgttgaggaacctgcttgaaaaccaacctgctcatctgctgtatgtgtgcagggggcctaggttgagctggtgcttgctcttgggtcagtgattcagtccctgggagcccacaagggtccagatgagttgactctgttggtattcctgtggagtccctatcatctttgggtccctcagttctctcaactcttctgtaagactccccaagttccctccaatgcttaggtgtgagtctgcatctcttttcattggctgctgtgtggaacctctcagaggacagttatattaggttcctgtctgcaagcataacagagtaacagtaatagtgtcagggattggttcgtacccatgggatggttctcaatgcagggcagacattggttggccattccctcagtctctgctttactttttcccctgcacaatttgcaggcaggacacattttgggtagaattcttttagtttctacaaatagagatatctcttagattacatttatctgaagggcaatcatgacatatcaaagagctatgaatacatttgcttgagttttgacatggttgaagaaactcttctcattctttccagacgcttccttgtaaaaattgttagcttaacattggggttaagtcagtggagcaaaatcttaggttccaacatggcttctcagcgtcggaaagatgctttggggactggtggcaagcagatggctcaaggtgtacattttttccaactcagatatcactaactgtgtatcccacacgagagtcacgtttagcattcccccagatttgaagaggaagtagagagtcagtcattcctgtaaggaaaaaaaagctctcatgggaatcttcaaatcaggtctgcctctccttcccatttatatcatggaagggctttgttttatcagaagccagagaccaagtatgaattagcattgccacaatcatggagaatgttaggtttgtacaattgtaggaatgaccatggagggtgtggatcagaaagccacgatgaaacccttatgccatttagagcagactttgttggccatccagttgttcttgtgattttaacaaccaaatgcctggcttctgtttcctggcaatctagatctgctctttatttctttttttggtcttgatagaaattaagtggtctggccatcaccatctctcagtcccctgtgaagagagccagatggaacaaggctcttttatatttgaacattcatcaagaattgaaataatatgaagacccatgcctgccctcagggagacatggcatgctgagctactctacaatgagaggtaaagcatcaaaaaaaccaaagatagcattaaaaaaaattaattttaagaacatgtgggtttatttaggagaaggaattttagagcctattattgaattatcccgacactgcaccaaagcactttcatttcagaatctcaaatatgtgtatttgagggaaagaggcaaacaccgattcccccttaacccacagcttaagcagtcaattcataacgacactttgaattcatgaatcatctccttgtcacttgaactgaaataatggagaaagactttttccattaaggtaaaaaaaaaaaatcctacttcaaatataccatgggctaaaaagtctttcaacagctcaagccagaaaccacagtagatcagtagagggctcttgttctctggaatgaacccagagtcaacagcagcatgccaaggtacaaagacctcaaccaattctggagtaggaagaagatgctctgccagcctgatagggccctaccctaatggggtcctgagatggtacctcacattcttcaggatcagccattcaagtggtcctctcaacatcacttgaaggccactgtctgtttcagtccatcatgttgctgaaagacgatgcctgaaaaagcagtgtaaggaaggaagagtttatttgggttcacaatttgggggttcagtccaccatatcatcagaaagttgaggcagctagtcacattgtattcacatgttatgagggagagaacactgactactcttgcccagttcttttttttttctttttctttttttctttctacttagtctaagacacatgcccacagtgctgcccacatttctctcctcagttagcctaatctagaaactctcctatagacatggacagagcttacttattttaaatccatcaagttgacacaaagattatccaagatcaacaagctttttctagaccagcttgcaatggtctcatctcactatgaaacaactatgtcacaatcatctctatgccacaactatgtcacaatcgtgtgtatctttgatgaagctacagcagtaaacatgctcgagaaaatatgttcctctggttcctctagagtcttcttaaaaagtctcaaagcaacttcaaaatgattagaacatatttactgtagaaatgaaggttaagcttcaggtccccatccaatccacctaattgtcagatgagatatttaaaagctttttttttttttttaatcaggaatgcctataacagacatgaaaaatttgggtttgattctgaacaatgaaaattttcacttatgcaagggttatttttctagttttttttccaagttcatcttcataaatttatgcagaatcatggtggttatttatatgaccaatgttttaccaatacaaagtttaagacagtgtgttatgatttcatgaggtctaaatcatcgcttggccagccactcccatttctctttctgttccacaatattatagttccatggctaaaggcatttagtggttcttgtaggttgaccagtatccacatgccacagccccttctccaacagtgtttataaaggcctgaagcacacaagaaccattacacacttggcgtcaaccctagagcctttataaaagagaggggggagggagagagaggagagggggaagaaagtggggaaaatggagagaagaggggagaatgggagagaaaaagagagaaagagagagaggggatagagggagggagggagagagagagaggagagaggagagagaaaataaaaaggaaatctaaattctctccatctccattccaggacactcatgtactctgacgattcctaagcctccaacttagagtgtcactgctactgaatccccaactttaattgaagttggcagatagcacaacagcaaactatggtttggggatcacgtggagattcttagttttctggagaatttagaacccacgccagaccacctccaagttttcaggaatgtagtaagttatgggattccaaaagatccagttagctctcatacagatggcagcctacttgctgtttgaggagaacagccatccagaggaccagagaatgtcactgagtagtaaattgaatagaccagttcagtaccaggtttggtccttaggacaaatatattttcagaccaaaaaaaaagatatttgaaaatttttgcttattgttaatgaagtccatttctgcctcatgaacatatctccttagatgggtgcctggtgcttccacaacttagtcaccagctcaggcgctagtgtacaaattcttgctctggaatgactcattgctaaggttcaagtcgtcacattccttatggagtcaaggttactataattgtcactgctatgtccagcagcctgggaagggcaatggagtgaagggaatgtcacacatgccatcataagtcactccctcatccttctgtggggatctggctggaacctagagaggtgaaggaggagttgatctgtctggctgatgtagacacagggaccacagcggcttcaagaatggaatctgagttgagattgtccaccaggacgcatgtgagtggctttaatttatggcaccaacattttggcactcagcagccacctccatcccaggcagagcgcgataccggtacatccatccaaaagatactgcaggtgtttccagagggaaaccaactttgatcattcctcccagacagcaaagaaagccatttctttgctaggtagaactagcaaaactcaagttttatttcttatcccttcccccaccaaaaattattattgtcttaaatatagtgcagtagaaaattaaaatacaaaaaaattaaaatactgtcaatattatatctattaccaaacagaagataagtgtaaattcatagaataagcttcgtctaattgttttggtccatatccccttttattattattttttaaagcatcccccacagtcattctttccacacacaggcatccctgggatcaggggcctaccatgagttactttccgatatcttggttgtcatcctacaataacagtttgcccagtcttactttcctagtttttattacacatgtagaatatatcattttttttggctctcaaaattaaatatcataaataaaagcattaaacacagtgtttttggagactctggctcatccacagcaactccctcctctgctctctctctctcccaaatgttcctgagtttgaacactgaattagataaatagcagtctgtctcatcagcaacagactcatcctccccccgccttgctttctgcctcattgactgtctattatcactcttttgccttaggctttaccagggagattgctctcaggaagatccctcaggctttcgtgccttgatcttagtcattttaaagtttatccagcaccatccaggatggcagaagcaggcagatctctgagttagaggccagcctggcctatagaacgaattccaggacagccagagctatacagagaaacccaaaagctaacaaataaagtgctaaagtcaggtttatagacacataattaggtgatggagttgtggtgcagttggtagagtacctgcctagcattcaagaagcccagggggttggatttctagtacaatataaaccaggtatggtgccagaggataggaatttaaggtcacctttggccaggtaaacagttagaatgtagaatggactaaatgagacgctaccacaataataaaacaagcagtacaaaattataaacatgtaatttatagacattcattcttttgagatgtagatataaaatttgaaatttgattaaatcatgaaacttctagcatggaaagattagaacattttattgctctataaaaacagccttataaccaattatagtaagtttccaccctacccaacaaactccatataagaatttttccccctttctagaatgtttaaattttttgttatcatacacacttgaaagtagacaattaaagctaacatagccttgatcatggaattgtctggatcagatgagctcgtgggcctgtctgtagggaactatcttgattattaatcgaagctggagacctcttcccactgtgtgttccaccatccctaaggaggtggtcctgggttatgttaaaaatctagctaagaataaactgaagagccaaccagcaggcacaatttcaacatggttcctgccttgagttcctctctcgacttccctcaatgatcatggtgacctgggactttaagatgaaataagcctttcttcctgtaagtaggtttgggtcaggttgtttttgtctcagcaacagaactgtgagctagaacacagggggaagctactgctgccagctctccagggtttctgcatagcaagcatgcacccactgagccacctccgcaccctcagacagagcagcgttagagtaaactttgacatcagattacatgtccccttaacttggatcttctcttttctaaattcattaaggctattctatttcctctgattttccacacagatttagaatcaactcattaatctctcaagataacttgttggcatgttgatagaaatagacattttttttaattgtatcttattacactgagtctagatttgtttggagagaatagatagctcaaagtcaactatttgtctcatccaagagcctgatatacctccccgctcatttatgtctgctttagtgtctttaatacacatatttttagctataataaataacttagttgttgggggattattttggtttggttggttttggttttgttagtttgttgttgtttgttcctgagcactgaaattaaaagtgtgcaccactggcttaatagtttagttttaattatataaaacttggaacagttttaaatttacctctgggtatttacttttgggtgtgactgcaactgatacttttattttcagttgtctattgctattatgcacacttctggtgtgtttatatgcattcagtgtacatcctgcaatcttattaaactcaggcattatctctcagagctcttgagtattctctgagatatcctttttggatagcttgttctctgtgaatggaggcagctaagggtctcttcccacctgagtgtctgttctctccctattgccttgctgaggagatctaatacaataataaacaagagctgcaaacacagaaatccgttcctgctctcaaccaattgtgctttagctcctgttttctttttttcccccacaactgaattttgtagtcccaacccaaattctccctgctctctccctgacatggtaggtgcctcttcttccagctgcccttattgggtgtgtcgtgcatagtcgcagatcccttgttgtcgcatagactcttggctttgatgtcttacttctgaacaaactcctcccacgtcccttactgaatgccgggtctttcctaaaggacacttctgtccagctccatgcagatggcaggtctgagtggcgcatcacttatccaaaatcactgcttttccatttgctacagagcttgtttctctagtacattaaaaaagaaaaaatcctggatctaaggatattgccagttggttaaacatcctcgtgtcttatttcaagtattgaaccagagccaagcaggccttccatgatatttctctctcaccctcaggcttgtttgactcctaacacttcccttcttgtcccttgttgtgtgtgtctttcaggatcaaatgtgacctccttaggaggcttttttctctactcagtctaggtcatactaccacttatatgttttccttcatctgatcatctgttattttcttcctagcattactctctgacatttaagtattggtttattgtgttatttttttatctctagaaagtaagcctccattgagggcaggagactggcattgtaactgtaacttgcttctgattccaatgcctgaactcacagtagatgtttaacaaataatgaacgctgaatgaacgaaatctctaattttccatccatttggttactgaagatagaaacttagtattgtcttattccagcaatgaaatggaaaccattctagattctgtgtgtgtgtgtgtgtgtgtgtgtgtgtgtgtgtgtgtgtgtgtgtgtgtgtacacctcctcctttccctccttccctccccttctatccatacctccctccctctggtgggctggtaatcaacttcaggccttactgatgttgaacaagctccctacttctgagctacacatgagactcttacatcagaaaatgatttaacacggggaattaggaaattcaggaatctattgtaagcacaaaagcagcagaggccagacacaccactgccagcgattaggaaaacaaattttaggaattctgatgaactcctgccaaagatctcagctgtccatcgcaccaaagattctcaaggggttttgcagtagtcctggcaaaagcccatcctgccaattgccagtactcatttgcttactcatcgctgctgagtaataacaggatttctttcttttccattttcccatatttcatgagttcttttcagagcagaaatctgatgtgagatcctgcttgccaaagagaaattacccattagctcaggaccccagctacctctgaagaaggaaagagaaagagaagggagagagagggaagaaaggagagagaagagagaaaggagagacactaacaacccaactcataagctcaccttccaatctatgatgaagttcacttgtttttactcaagtcttagtctctccatatctccgttgtctgtgctccgctagcccttcctacctctataaaataggacactatcctctgccacagcctgactggcatgctcctcttcatcctgctttgttaatgtgctggaaatatatacaactctctcgttccccagctcaggaggccccagtgcttctcattgcctgtgagtgtaaatggaagtacctcggcgtgggaagaaaggccagtgctttgtccttctttagcagcatcctgttagctctctctgccttattcttatgaatcatgatgcagactctcagctaccaccaaagcaccacgccagtctgcccgttgccgtgctttttgccacgatgccctgaactctattttaccctccagaaccatgagccgcaatgcaaacacttttctcttataagttactttggtcctggtgttttgtcccagcaactaaaaagtaccttatcttactccatttcctttgcctcgccccatcctttggccttttataatgcccatcctacaattgagtaggaccctccccaaaacagtgctgccattcagattgtatgagtctgtccacctatagaattataagagtctttctgactgtagacttcataaaagaagaataagttctaggaatatgtcacctcttctctagagttaacatcttcaagatcatgttttgccactttcagagactcatttggagagtcttagcatcttatttaaagatgctttctctgccttgagcctgtgtgtggcaaattaaaccaaagagcgtatattagactatgccatgcttatttgactttggattcaactactttctggcagtttttgaattctttctcctaagcaagcacactttttttgccatttcagaatctctctcagacagactgtgtagcattagagttgaatgttctcccatatcttgcaaaataacaccacatggcattagaccttgaagatccagtgcctaaaaggcagagggtaaggaatgtcttgtaagaacatttgctactcttgtgaaggactttggtttggatcccagcacctacatggtggctcgcaaccacctgtaactccagcactaggtgatccaacaccatctctggcctctacaggctacaggatgcatgaaatgcatataaacccatgcagtgcacatatacacataagtaaagcatagtagtaaataaaaagtaaagaagatggaatgaagctgtataccttaaagcttttcctctctgctatgctgtggtcacggtgaaggtttgcacattccagatttttatgtgtaaggaagtctctgaggaaaccaagacctctgtggcatgagttgtgccagacctaggtggcaaattgccagaactgaaactccactgggcatgatagtggtcttgcctgccccgggaaggtggaggcagccagcctgtggggtaagatgttggcaaggcaggggcattgttatggttttacagtcataggaatggagcagaattccagctgagaccactccagctgagacctgagagctatgggggtgaatgggaataagcagacctcctgtgtgcagagctggagtcctatccatactctacagtgccatagctgaaggaaagtgaggaaacactggatacatgctgatttcacaaattataagtaccccaatccttacaaatatatcacgtattagtaagaatctcaaaagggaaactgtgggaatcccacaaaaatacatatgtgtataggcttggaaaaaatgatgagctattagggatcatttccaaattaaaaatgaatagttcaaaagaaagggacttggtggcatgtcttaaaaaaaaacacaaagaaatttaaattttgtttttttctttatcaaagtattattttttaatattaaagatgacatgtaagagccagctgtcatggctttcacctataatcccaccactcaggagagtaagtctggctagaggatcaaaagagttcaaggctagcctgagctacacaggaagacagtgggtgaggaagcagaaagaagaagctgcaatacccttgggagacagtccatgtaagcctgatcaatctaagtgattgattaccatgcactttatattgcaatttcatattccaatgcccttatgctaattaactgactaaacatttatagttctaaaatatatttttatttgttttatttacaatccagtcatgaccctcccccaaacccagtcatccctcctacagttcctcatcccattcctcctccccttgtttccaagagaatgctttttaaaagtatttccataccactgaaaggattgtatttatatgggtcaatcttggaatgttgcgttgcatatattagcaattacgttctgtgacagatcgcctaccttagcctgcttcgttaaagtgaaatctgctgaagtggtcaagcaccatagcaaatatgtttccttccaacccactcgcatttgacaaaggactccatgaagagtctcagtctctctctctctctctctctctctctctctctctctctctctctctctctctctctctcgcttttcatcttggggtgttttgaaatgctttaaagagttttgaagtcagtgacaccgctgacaaatagcacgcacccaagtgcccacgtaaaatgtttcaagggcatggttgaagttcagcttccctggcccattcctgcctatgaagaaatggaatagcagtttgtggggagcgctaaggctcccaggggtatttgtctggatgtgactttctccaggaaaaagtggtttgatgatctctgtcaatgtcaacaatctgcataaatttaatatttttctggacatcttttgaaagaaacaagcttacttagatttacataattttagctttttacatgcatatatatatatttaaatatgaaagttggctctggaatcttgtgatggttgctgggagagaaagcagcccacactttttccctttacttgttattcgttagcctcacaccactgggaaaaaaaaaatcatgctcaaatttggcaaaaaaaacctcaaacaacaaaattttaaacctttccatcccttcttttttcaagcaatgctgaaatgaatttttcctgatggattctgttatcaaattattttccttctgggggaaatgtcacaagtttacttaaacatgagaagtagttttatccctttttctactaaataggtcagttaaaatttgaatatcactgaaataaaagggaattttgatgttctgcagctaggcaacaattttctatttaagtgtatgttttatttcatcccatcttatttgttagaggatttgaaattactttttgaggacatcttttgatatgttttacatctctgaaaattgggtatactttatgactttggaaaacttctatactttggaaattgccttgaaaaacaataatgtggcttccgggataaaggaccagttttatactgtacaaaacaaatcaagaatatgctggttctgcaatataaatgtcaaaactttttggagctaaatttttgtaaggtctatccataagttatattatttgaagaggaacgttttccattcactattttggaaccctgaagaatagttctcactttaggacctactagcaaatggctggtgagtgtaataaatatttaatattgttcacattatactcaggtgagagtaacatgtatttattttttcttatgtgaccaagtatatgctttatctcactaatgtcataaattaatataattgttatgaaacctggttagccactattttattatttgaatagttgtcagttcttcgttccattgtcataacttatgtttaccccacacgtgggttacttctagaactatttgttgagcgtgttcttctgtgccaggaaccatgctacttgacacagacctcacactccttgagttgtcaatcagatagaggacacacactctctctttagataatgagaaaacattacttaacatcaagtgttgcattttattatattttagttctttattaattaaaataaagattagatgagaattagtgagatgttacctgaattgaatcctctgtataaatcatggccaaaaaaatatgaagtaggtgttaaaattcttattttacatgtgaagtagtatgatgtaggctgtagttacaaagctataatctgagcatctatttatattttgtatattttatacatatttgtaatgtactatacaaagtatttctcttccatccactctatttacaaagcacattaaggatacatagtaattattgggtttgggggcaccagttgcttaatttcttagatttggaatagttttcattagggagacaaagaagcaaggtattacaaggtgataatcacagtggacatgcactatttatttgatttgaaataccattctagaaggcaaagccattgttggactctgaggaacaaaaaagggacagtgacctacccacagaaagaatgctatggagaagccgatcggttacttatcagcctgctattattacagtgccaaaccgacgtgctcgcattgcttgggcatgatgtgactggtagttatggtcaaacaacatgataaggataaagtgatgacctcatcctccatgaataacttccactttgttttctagagtcagtcattttaggaatacagatgaggaaggcatcacaccaaatatccagctacgtaccagagtgcttttaaaccttggtcacagccagacaggaaagatcttgtaaatataaattctgctgaactctcttgttgagaaagaatagctttattgaaggagactcaagacagggttagaccttcaccctcatatgtgaattcagaataatgatttgttgagcagtggctcccatctttagatttgaaagatgattgacaaattctcaaaaactttaatggagaagatgcccattatcccccacaagactgcttggaacaaattcagtttttacaagaaaggctacaagggcaaccataagcaaacgtgcttctgggtcagtcttctgcaaaggtagccacacctagacaaataagaccaatctaagtttgggataaatataagacaaaggcacaaaaataaaatgaaattaagaaatggaataattctgtgtcaccaactcttcttgaatggtgttttaatatacaaaaaccaaaatgaattgcggctttgccatatacactcttcctctaatttgccataaatccatttttttaaagcttctaaagcaaaatatgtgggagtaacttcatctataagcatccaaaatgggcagaggcgaactaggtaaatggaacaggatgatcatttcactagagttgatctgggtgaattgctgctttaactatttatatacacagagtgtgcgtctcttaagcaaaggcacatcctaaaatttaagaatacagtacacgtatatgtaacataggcatatataatatatgtataatatgttcattatcacgtatgcatatgtagatgcatacagcatttctatgagtttgaagtctcactaccttcctggattgtgaataaaggagtaactgcatctaaaatggtgcatttgatagaaactagcaagtcttaagtgaacacattgcaaagagttaatatgaagagaacaaatattcataagttttaaatgtatccatttttttctttttcatgacagggtagggtatatttatgaacagagaacatgggtgataatcacagcatgtattgagccattgttgtatgcttaacgccgtggtgacgtcttctttttgagggaattatttaatcggccattgtgttagcaaggcactgctcttgatgctaatgtagaaatgcgagagttgaggccttgccaacttcagtctgactccacttggccctagttagaaaaacatggagtgtgttgccctatttgttttctttcctgcattggaacaggatgttgctgtatagtccagcctgcctttgaacccacaattctcctagctcagcctccagagtgctaggattacaggggaggccactgtgccaagctcaagaaatagacttttaaaaacactagcggtatcacagaatgagtggagaggggactcaagagtatcatgttctagtctagactaccattccttgagggtgggtgccaagtccttgcacagttccagagactctacttgattggaacaatgagagaacaaagaaaagacaaatgcatggacagacagaaacatggacacagaaaatctgggatctcagatggagaagtcacagcctccagaagcccaaagtatttattttatacagttgaacagggatgtggggttactgcacacagctgaatcaaggagggatatttagctaacctgggttagtgcagcctttccagggaagctgtcttcaggccataaacatttgtctgggggagaaagctctggtgtgttgtcaaaattatttcatctcagttaaggcttccaccggcttttgatcattcagttcccagataaaggacacacaacttctatatttacaataagccttaatcagcaccatagctgggaagatatctgccctctatgttgttaaaatctatttccccatcattaacctcatttcctactttgccatgttccatctggacagttcttaactccatttgactagccctcatgaggcttacctacaccatggtggcttcctcctctctccacctttttctctctcctctcatggttctccccagaccctgcctatctcaattctgtctggctataggctgtagacatctttattcaccaaccagggataattagaggacaggtcactggatatgtcacttgggtaccagcagactcgattacccctgggggcaatcagtccttggggggggggcagtatttagcattataatacaaacaaaagacaaaatctcattaatagtgagtgttttctacagactgtcagaattcacactcatacttcccagagaaagacttccatccctctgagcttccactgagagagactttgcaaagctgtcttagggttacactgctgcaaagagacaccttgactaccatggcaactcttataaaggataacaactagttggagctgggttacaggttcagaggttcagtccattatcatcaaggcatggtgtaggatgagctgagagttctacaacttcatctgaaagctgctaagaaaagacagactcccatgtggctaggaagagggtctcaaagcccaccccacagtgacatacttcttctaataaggccatacctactccaacaaggccacatctcctaagagtgccactgcctgagccaagcatattcaaactaccacacacactcatggtactgaggcattagtctttaacgtgactgcatctgggttaacaagtcacacccactcaggacttcatccactctggcttcctccactcccttgaaggtaggtactatcttggtgactcttgtggtcagttcttaagttctcaattgggtcctttatatggtgagcaattggctcgccatatgaagaaagcgagaagactcttgactcaacatcagacaagttgcttgacccatgtgagtgccatcatcttctattttatttctagaatctcttttattcccaaaatgatttgaaatagcctgcatagatatactgtccaagacctttaagagataagagcttgagagtgatagactttatttagaactcagactgaaagttagtgaagaaatggagtcactgctggactgactcccctccactgccacccctcccccacctactcactcttcttctgccacatttggccagagcaatctgctcctgtgggagtcttgagaggaaagaagagaaaagcccaaaataccaacttggctgtctaattgtttttaattatgaaatcactcaaggtcgagatgagtgtgctaagcccatttcagaggcagagatccaaatcctcaaacagcagaaaaccttgggggacagaacaaagaggcttctttatcaagtgaaatctgaaaggttctaaggagtggagagtcacaatggctcttaaaagaagtaggagatttaaacagtaagctaaaaaaatatcaaaaagaagcagggcccaataaaccgcaaacacccacacagcaacagcagtgatccctgacctactcctggttactgagaacaagagagaccatgagagaatgaacagggaaaaaaaaaaagctgttcagccaatgtcacaaaaacccagtttggtaaaagcactcacttccccagggaggttgtttgtttggagttcagaccgagcaacttgataagaaaagaatccgaggagaccagcgagaaaaataaataattaaccatgcaaccccgtgaacggtggctagctaagacagtcacattagaccttcaaagcaggttagtaccagtgagaaaccaggcctgagactttcacctttatgcttcaggcacttttcctttttcctgagaagccagaccctaagtcagactgggttacactttagagatcaaaaggagatctttatttaacacattaaagacactgcctcaagttcttcaatgcttatggagatgtgtaatcacctgcttccttcctaacttctgtgattgctgtcttaagtcaagtggtaggcaagtgtagagctatttggttaaaactgtgtctattcaaggaggccacagcacataggcacctataatcatagccttaggaaggttgcactgggaagactacaagttcaaggtcagcctgggttacatagcacattccagggtacaatgagatcctgtctcaaaaacccaggggctagagatgtagctcattgataaagcactagccaagcaaaacaaaacacgaaagcaaacaaaaaacttgcatcaccctgaaagtactgtatgtgtgctagctctctttcttctgcataggtattgtatagatattcttactgggtaatttctaataagtcacatagtgactttttctctaaattatgacccagaagcatctggatggacaagcaaaatactgtctgatttatctcgtcgttttcttaaatatctttcaatctgctacatctggatgagcagtgatcaccaaggaagtagaaaggaatgtggagaatgaaggggtgagccttaatatgaaaaaaaaatggccgatgtggacataatcaaatgatttctaattaccatggtgactcttaaaactccgtcagagctggggctgacaacccttgagaaaatgaaggaaatctgacatttgatcttgaactcaaagacaaacaatgtaggaatgttgccctcctcattctcctcccagtcagatcaatgaagtcatttccaccggagatatgagtctgaaaatcagattatttgttttaatctgtttaaaagttgagtggaaacacaattctgacttgtatggagccatgaattgactagatcattggctgataatgaaagacagctgatattctttatgatgtatcttcagggctattttaaggcaatgcataagctttgagtaggtgttcacattttataaatactgcacaccaaaaaacgacagtgtgtcttataaaacatctcatctctctttcactgggtgagcagaactctctctgtctgctttatccaagcatctaattcactcccccatgtgctcatatcaatttctttttactttaaaattcctttcctcaaagttttgtgtcattctggccaatatttttattaagtgtgtgtgtgtgtgtgtgtgtgtgtgtgtgtgtgtgtgtgtgtgtgtgcactcgcatgatcactttagtagcacttgagaaaaatccttttacaaagatggtctctactaagatctcaatatttatgatcagagacaaaagtgagttgtacatacgtctgcgtggacgccttcactagcactgaaaaaaacaagttcactgtattaaagaatgattacaacaggtttggcttaagctttggtttctcagccacatcatgctcttcatacaaagaggttacagttacatattagggttttagcatgaaaccatctagagaaagaggcccaagagcatgaaagatagttgccaaatccttcctgcatgggttagaaagcccacggcatgattgtcacaatttaagaacagagatagtccaaggagcaaggacatgtactggtttggatacattacaaatcagagtcaagttgtgggacctgtgcacatttcaaaataaaggactgttttaatatgggtgacagagcaatccttgtctgtgtcctttcatcgcacatcaatgggaacaaaggtaaaaaccacactgagaaagtagattcagctgcagcaggttaaagatgcagagagtacatctttacagggattggtcagccaagttggggctggatcatgcgtgagagttgctgcagagagctcaatcacaaggtggcactttaaccaattgagcttctccttccctgggaatctctcatttaatacacagaatggaagctagagtgcaattagtatggagatgggagagtttgagggcatcactgtacggcccgtgcctctggaccacttcagcggagcgtagactcaaggcctcttgaggtccttcaagggtcaggtataatttggagcttcctatcatgacaatggtgtcttttctttcttcttatgatatggaaaggaaataaaatgattatgtgcctttaagaactgcctcatggtgtgccaaggcccagagtgtatttatgacattaatggatacttccagcccccatatcttcccttcagaacaaggggtttacttatccaattgcatggggacttgggaccaactggaagggtcatctcagccccctaactgcctctgttaaaaccgtgaggttactattgttagcttgatgctatctagaaccacctaggagacaagcccctggtaactcaatgagagcacatctgaattaagttaattgaagtagggaggaaccattcaaaatgtggtctatagcaccagcataatctctctctcattgtctctctctgtctccttctctctctctctctctctctctctctctctctctctctctctctctctctctcctccctccctgccttccccgcctctcccccctctgtctctctctgtcttctccccctctatctctgtctcccccgccccctccctctccctccctcctacctgacaatggatataatgtgaccagctgccatgttcctcctaccatggctctccaccatgatgaacttctcattggccaatagagactcttcctccttttgtcagtttcatcagagaaacaagctaagttattttaatgaaggcctcatcagaagtttgctttcctccctgcccagttttcctgaccctgctcctttaccaacataaacccccttcagtaaatacctccttcgtgggtttctaaggcagcagaagcgataatggtgctgatgagtatgtggatactcttgggtagaggagatgcgcagcaggcacagggatgagatggtgcacatgacgttttgtgagcatgctctcagcatgtggtcattataataatccatggatgggcagtgttctaatctcttctcaatctataaataagggagtttagtaatgcaagacatgactccatatataaggatgggtcttatggaaatcttgtcattttcaattttaatgttatttcacctgatttctgtacccagccctttgcagaactcaaaacacgttagctaaataaatgagctgattttgtcagatctttgtaattcccctgtccctgagagtctggggagataatatattgaatggttctgcccggcaaaagaagcgtgatttcgaacattttgaactattccattcggtaggtcttatacttgctagctcagaagaacaatttgttttatttagggaaaaaaatgatggcttgtatataactgatttgcagagcagagagaaacatattttaaataatacgcaagaaaccctgtgaggtcctggcatgctgtgctggctggccttctgggcttgtgtttatcacagaccagcagaacctgaataacaagtattcatggtcaatgagtgtccgtgcttcagtaggtgagtgcactttgtgggccacttaaagtaaaacagcatttccaagaagtcccaactgtgggcgggggtgggggtgggggacggatcatcagagaaaactcaacagctccaatccacaaagcacacagcagtaaccatcaatagttgaattgagaaagccttccgtctgagtgcacagttcctgaaccatctcacagttcccgaagcattaacacaccgcaaagattggcttccccacttagatttgtgtgtgtgtgtgtgtccacttagattttacttgaatgaagatgttcggcttctgtagcacgtggatcttcaaaggctggagggccagcttgtttagttaactgcagaaagactccctgccacgacctgggatacttcactccgcaggagtgcgaggtgaagacgtctccaccagctgagagaggagctgttgagcaggggaggtggctcacagcaaatgagaggaaataaaaaccattcttttcatagtgcagttaggcgccctgtaaagaaaggttagaaacagaaattgtttctttcacttcagtagcaacctatagttgggtttccaagtgataattgttgctagtaagaaaaccagcctttaaattggaataatgttttctttcctccttttgctggggtcagaaaggggaggggcgcatttcctcacccagcagagtgtcacagctgtcatttgatgacaaggacaagttaacaggatacacattttttaaaaattcacttaatcaaagtttatgtgtccccgggggccttcagaaacaaagacccaaagacctagggaaagctctttatgctaaggcagcaataaggaatggacagttatgctgaaatgcgattggatgaacgctgaattgtgattggatgaaacgggatgatgtaatgtggtaggtgggggaagggctgtctgataggagttccttggtttctgtgcagcattctttaccaatgggcagcgcttccacagaataaggatcttctagggacgagtgagaagagagaaacaatcttcttaattttatagaccgctttgaggagctgtcaaaaatctaatcagcacacccagttgtgtgtcttctaccagcgatcatacatccagacttttacttactgaaagtagagctagggcattgggtgagtccatggatttgttgctgctgcagttcacacaatatgaatatcttttgtgccatgagtatcttttaaaaaataggttagaactatgaaataggatcttgatactcttcttggtcttcttagaacgttctaaattctgaagcacaccgtgagatcctaagaaagggagtagttaccaatgtccacaatttctttgtgtgtagacccatttttaacagctgtataatctctctctctctctctctctctgtgtgtgtgtggggggggggtgtgtgtgcacacgcgtgtgcgcgcgcgtgcatgcacatatataagccagaaatcaacatgggtctttcccaatcactctacaccttatttttaaagatttacttagttttattttacacatctgagtgattatcctgcacatgtgcgtgtgtatgtgcctgtggaggaactggaattactgacagtgtgagccatcaggtagattctgggaactaccttacttttttgagagagtgtgtctcaataaacctgtagcttgctaactttgctagattggctaactagccagcacacaggatatgcctgtctccagctcccaggtgctgaaattacaggcgatttttttcccctttaatgtggatactatggtcttaactcagttcatccctcatgcttgtgaatccacactttactgatgtagcttcctccctggtccttggtgacttttaagcactgagcctttccccatgctgtgtaacacagaagtctgttctttttttaaagtgttctttttatatgttatcagattccagccaactttgccgttctcaaataaattatcacacctccatgatgctaagacataatacatggttggcaatttaacctcccaggaaacaagacatgtctcattcaggtcacagtcacagcatctttattgtgtccatccaagaaaacccagcaaaggcaagaagattctgaacagaaaagcagctcactggcttaggagtgcttcggtgctcactgtttctcagattgggggtctcgaaggcttccagaacactagcaaaaaatactgcatctgagggttggtgaagtggtgcggtgcaggcctccattatctctattgcctctattatcccttctcctccttctttcttcttcttcttcttcttcttcttcttcttcttcttcttcttcttcttcttcttcttcttcttcttcttcttctcctcctcctcctcctccttctcctcctcctcctcctcctcatcttcttctcttcctcctcctccttctccttcttcctcttctcccctttcttatttttcttccttcttctttctttttctttctcctttcttctcctccttcttctccttcttcctccccctctgcttcctccttctcatcttcctcctcctcttcttcttcgagatttattttatcttattaaattatttttaggtatacatatataggcatgggaagcaggggtgatatgtgcacataagtgcaagtgaccaaaagaagtcaaaaaaggatgctagattccctgaaactagaactacaggcaattgtgagctgctcattagaggcagttgtgagctgctcagtgtggcttcctggaaatgaaccctggttctctggaagagcactccacattcttaactgatgagctacctctttcccaccagccccagtattttacgtctattgattctgaaatgtcaaactttgaaaagcactagacagtgaatgctgccattcagaacagtccaagtctgtatgagaagaattttaggaatatcttcacctaataatttcaagtctttcttgtacacagagggagagatgggaaagggcaatctaatggatttgagaaagagcttacagtaaacagtaaccaaaatcccagtgtataaaagaacactgcatctcacttttactggcagcatgctgatcatttttctctttctcattttagtagaacataaaatatcagtatagctcataatccgagtttctcattttgttggaactttttggcacctaaaataaataccttacatagagaagatatccaacagatacctgataataatgatggataatgaaagcagccaaaaaatatagagccctatacattactaaattaaaacaaatcacccaaggaaatgttccgtaaggcctcctttctaaaatacaaatataggctaggcatagtgacatacatctgaccacttgggaagtggaggcaagaggatccaggtttccagagttgttcacatatatgaagtaggactcaggatagccttgtttttgtgagactctgtctcaaaaaggtgctggtgtcacatctctgttgttgagttgttgttgctgttgttgttggtaatggtgataatgtgtgtttaattctatgatataaaaggtagagaaatggcctagtgcttggttaagagtggttattgctcttgtaaattttcccaaattttggttcctaagcatccatgtttagtgaatcacaactgccaataactccagatccagaacctgacatctctgccctctgcaggcatgtgtacacacacacacacacacacacacacacacacacatgcatacagatacaacacataccatatgcatacccacccagggccctccatccccaccacatacatactcataattaaaagcacatcttaaaaaaaagttgaaccatggtgcatggtagcttcccaatccttggagatacatctctaccatacagagcaagccttaatctcctctcttgcccaatccaaaattgcaactacatccacctccctggggacttcttgccttgacactgtcatgtctgctacctcccccaacatagaaaccctgtttctgcctgtcagagaggtgacccccttcttcatctacctggactaactcaagcacagcccttcatgaaacacagacaaatgatttttctctttgctccctgggggcaattactctgagaaatcccattgtgacatcactagggattggcttatgtttccacctctaccctggaatgtgagccttgatttaataatctggcacctgatgctattcttggtaggtgtgatgagtcaagggaacatttgattggatggaggaacggcattcagggaagatacaacacaacagtgcctcttccggattcgcttgcttttccgatcattcactgtttctgcatctgcattcattgagctggaaacaagttgaaggcaaagccaagctggttcttgccattgagaactccacgttctagccgacagtgatcgtgatccataaacgggcaagcagatatacagacacagtgtgagcgtggtcaactgtaggctggctaacaccctgtgtccaaatgcagctacaatcttataggaaaagctggctctgtccataaatgtccagcccctgtcctcagaagcatgtctgggaacctcaagaacttctctccccgagatgtgtgtgttcctgtgctgctctggctgcactgctttaagccttcagtccttggtcttccccagctgtgctcctaaggacacccaggcttcagaagagaactccccctcagaggcggctctgcccctgcagcccctggatgttcttgcagtcaagttcttcaccacacatacttaatgaaggggttctgggagtagagacaggagggctatgagggaggataaggtaatcactgatttaaatgagcaggcaaggaaagcattcaccacagggagggcagggttggggctgaataggcctccaacagcttcacttggcatagcaggatccagggacccttcagcgccagccaatagccagtgcctatatcttcctccatgacttccactggtcctcaggatttgtgatggccaacaataaggctccctgtcaatttgtgaggtctggaacctccagggaggcacgcacctctgggcatacctgagggtaattgcagaaaggtttacctgcaaagggaagacccatcgagagtgtgggtaacacctttttaggagttggggaccgggactgaatagggagaaggaagccagctggcttcagtgtttatttctctctgctttttgactttgggttcgtgagaccagctggcttatgaccctgccgccatgttatccccactaggatggactgtaacctcaaactgtgagctcaaattaaccttcctccttcaagttgcttcttgtctggtagtccatcacagtaatgagaaaagcaattcacaccgcatctgatcattcctctcaacaggagccaaattaacaacatggtttttgtttgttttttggtttttttgttttgttttgttttttaaacctgtgttctatgctcatctactttttacaattatatataggaagtttccagacatctgtatctatcatagttctcctcacagtatagcaatgcaatagcaatgagaaacagaggaccaaagggcacatgagaccctttcagttcagttagtttgcataacaactgtttcctgagttagataatatctcctaaggctcagaacaggttaagtcccccaccagatccctacagcggatgctgacagcaaggttgggtctgtgcaatctatttatttgttcagttaagtagagaaaaaaatcaattacactggcatatgggtttgaaactaggatgaggaatagcccttggctaagctgcttgagtctgccgggacaccagcagggataccctgatggactggtgatccaccacactagaacggacacttcttcactgggtcaaatcagcccttcggatgctcgctctgatgatgtccagccaagccagcaacataggagggagcaaccaggaatgaagcttggcagagctttatttcaagatagccgggtggctctcaatgtaagtgacgcccaggagtccactggatgaaagtgtctgtgacaatgagagatgctctctgtgtcaccatggccagtgtcatctggctgtgcttacctgtatccactgtcccttttcctcatcctcagcagatcactattacacatctctgaggctataaggagcctggtgaaaggccagcatctgcaagctacctctgggattggggccagaaaaggagatctcaggccggctgcctggagaatggaggaaaggtgctgaggacaggccaagctggagatgtagctcagcggtagagtgcatgcctggcctcagcaggacacactttctttttcctagctgtatatggtgcccttggcaagccttttcctggatcctgaatcctatgtgataggacgtaactcttcggctcattcttacttctatgattgaatctcagcatttgtatcagaagtgttatatcagaatcatttatatctctgaaggacaaaaggtgacagacattcttcttttcaaattttttttttttttctgggcatttgcgcatttagctgcttccggatttggcctttgcctcctcagcatttacaaaccctgccaagtttcaccctgtctctcatgggtttcttttcaatggctccggtgaaaccagcagcctttgttttaaagagtttcttgccaggcttcctttgccgaagctgatgtttccttactgatctaatactgctgggacgacagagccccgggctgcttctgagctgggcatttggcactctgctggcacctccccgggaggcattgattccactggctatcgcggtaagtggcaaaggtcaccctagatacactccagatgtggccgagtgcctcccgaaaacaaagtatggttccccccacgggagagaaatggctgccagtctcctctcccctggccacttttcaagattatgaggaaacacagtcactctcgctgagcctaggtacaggtctctcctgagcatctcgtaaactcacaatgtgcactgaaccagacctctggccttgagccgagcctagcaaaacctgtttgtgttcaaggggttagttctcagaacaggaagcaggttggtgggtagtataattacaggttagttttgttgttactgagtaacatccccgcaggctcctactgacatgtataaatgcagactgtacgatgaaggtcccctttcagtttccatgatcatagtcatttgcaaacctggagcttggggaggctgggatatctaaaggaacgctgttattacagagtagccgagagcatcttaggccttcctaactctgcttcctgggcctcttgccgtctttccccactactttctggaagggttgcagaacggcagggatctgatttctcctcatgggatagccttctatgatacacacttggtagtgccatgtgtgtagattatcttatgtcaagtttttttttttttaagttttcaaaagaacaccaacattttcaccacttctatgataagggttcgttcttctgtaattgttttcttaattttgacttacttggtacttggatttctgaaaagccttcagtaggctggactggtttgggtgttgggggctggacatatgactgtcactctggatattaatggaaattaaaattctttgctggatatgaaggcgtgaacccaacagcctgaagaggtctctattttccaggacagcatcttagagaatggattctttgaaccaaacctaattgacttgacttttcaatctcgaatctactttctaatcctatccaaggtggttgtcacattccccgtcatggacccaattaggatgcacattattcctgtcattgtgagaatggcgaaacacttaagagtgtggagcaacctttagcccattccgtttgttttgagggattaggaacttctgcatatgctttatgaaactgtgattccattaatcaaaccccactccagctttactccccacactgagccttacacagagtttctctgttacaggagaagagatcttttggtagaacccaggcatggaggctctagcgtaggtgtgctcaggagtgtgttgacccaagcaacaatgctctcattgagttttacggcaaagaaggaaccaggttaagaaggggttcaacttgggaatcagcagataagtggcttgtgatcaagacaccaggaagcagcaagaatagggaaacagcgaattcttttcaagaaaatacaaaatatccccaatagttctcaccgaaatagctttttaatgggaacagcaataataccttagttagtctgcagtttatccatcttcatttgcaactttactaagaagttgtatgacatcaagttaccttaaccttaaaattccaagggctatattttattctatctttaaaaataactttgcagcatgacaagagaaggttaaaaactatagaaaagtggaaagaattgcaaaatcagataaaaacatccttcacctaagacccacaaggtgatagtatggtgcatatttgcactgtcctcatttaaagaaaaatgatagctaatagataatgatagacaagtgatagagagacagatagatagaggatagataatatatagacatgataatagatatataggtagacagataatagacagacaaaagatagatggtaaatatggatatatttatgtataacttagctcctagatagataataaataattaggtggtaggtaaaagacataaattacaaataatataaatttgtatgaggtataaattagcccttaaaagaatgacagataatagataatgtataattttaccaatttatccaatattatttctaaacattcactgtgttttattaaatacatactaaataattagagtatattatttagattacactgtatatattctagtatggtagtacatgttttcatacagaacatagtgtccaagtgtaaattcttaccatcattctacagtttatttcattaaaaaagccccccagaaacagtgtatgtactatttttatatgtcaatggataccttactgacttttaattacattacaaatgtaattattatatatagaaatttgaaactattttatagacattctgcttaaaactacacagtaagtcaaacacctcaataggggaaacatgcaaaactgtcagtaagaattcgacagaggtggtgacgtaaaagacctccaaatgaagagatgttcaattttgttaatgactagagagataataagacagtaataaatgatgatttcacagctactaccctggctaaaatttgaaaacaagatgataccaagcatcctgactaatgagaccaaagcaagggcctgccaggtccaaggcactagcaatgtagaagacatctcatctcaccgtgaaagatgagctaaaaggccagatttgcctcttagaagcctgtccatagcaatgcataaatgaacacctgcacgagaagaataggagttagatatttgaattagaatggactcataggacaagagagagattgataagccatgccagacaaagtttgaagagtggggttttgatataaaggaaaagccagttaggacccaagtccttatacagagctgcacttagcaagccctctgcaaccttgggttcaacattagcagattcagcctatcacctataaaaaagtattcacaaatgcttccatgtggtgtgatacatagtaggatacaactataacactaggatttaagaggcagaggcaggaggatcaagaatccaaatttagcctcaaccaggtagcaactttgtcttggatagggtttcattgctgtgaagagacaccatgaccacagcaactcttataaagaaaaacatttcactggggctgccttacagtttcacaggtttagtccactatcatctcagcaggaagcttggcagcactgcaggcagacatggtgctagaaaaggagctgagagttctacatcttgatctataagcagcaggagactttgtcccacactggatgtagcttgagcattcaaagcccaaccccacagtgacatacttcctccaactaggccacacccacgtcaatgtggccacacctcctaatagtgccaatccctatgagctaagcatttaaacacatgattctataggagccattcaaacctattgaatagggagacctattcaaaccaccacaaaactcaaggtcactggagactaatgagacctgcctcataaacatgtgtgcatctagacttcttaacactattttctaagtaatatgacacaacatgcatagtgtttacattgaattagatgtgatctgtatggcaacacatcgttttatacaaaaagacttgaacctctgatgactatgttatcctcgatgagagaaggttgccctggaaccattctccattagttaacaagggacaactctttaaccatcaataaagatgaatatggggtcacaaactggcaaaggattggtttcagttcctaccagctttctagtcctatgaaacatgggggggggtggggttcaggttctcctctttagagaaagaactgttaatggtgtaatggagtaggaggtgcatgataaagaaaggagaccctttgtagtccaaaagaaaaagactaacggtttccatacccaactaagcaattcatttaagtagaataaagttgttttcagacataacatgaaaaaagtcatacaaaaatccaaaataaccttagaatatttgttttacttttataaagtatcaacatttaattagaatcatgtcggttttcctgaagtgattgcatccataaatgtatgatgtttgaagatgagataaaatgaggaatgcacatgaaatcttacagtactgtaggacatcatttgatattagggaagccacacatagtggcttatacctgtagtcacagctattcaataagctgaagcaggagaattccttgagttcagaagctgaggtccagcctaggcaacacagttagattctcatcttacattcaagaaaatgtgtgtattgagaagctacagcgttcaagtatagaaggcaataatgtatgggccagattggccttcaagcagtggcagagaaagtctgttaatgagtgaaaaggcacaagagatgtccagtcaacagagacatcccctgcacagtgggggcacagagatgagctctgtgtgagagtaccactggtgcgtggtctatttgagcatgactctgaaggatagagaggcagctgggatccgaggttaaaggtgctggatgagggctcaggaaagaacctttcaggaaatagaagcatccaggagtccaggaagcctttatgccactcaaggtgtggaccttggggactgaagagcagacattcttaagaaattgtcctggctagttcagaactagcaaaactcggtgacttaacagaggatgactccagtgaccatctaaagtgtgggactctagccaagcaggaagggtcgactcaatccttactggacataccgatcctgtgtgggtcaaagatgaatctgcttggacaaggagaggaaacaggtttccctaaatctaccccccacagaattcctgtcatattgaccctgggaatgacgacagaagtcaggaatgttagcttgggcaggaaagatgcaatcctcacaaaatataaaccaatgtctcctagcaaacaaaactggtctatttgcaagtccaaagtgttaacacaccatttcaaacagattgctggaagcagagctaagtaagacactgctttgaaaatacatcaaatcgaatatgactggagacaatacttaaaggcgggggggggggggctgctagagatttaaattgttaatgacattaaccgtggaagagtccccgaggaggtaggcttttgagagagagtggaatgcatatcaagatgctctggccttgaagggaatgattatgttctcaagggatccttcatttgatttttttatttaagtattttaaaaaataaaactaaagtataaattgcattaaagggaattttcgatggaaactacaatagaacttttaaaagctctactttaaactatgtgatgtataaaaatattaaacacattctatagataaatggatcattcagaattactaaattatctcatctgactagactatttattattttgaccacatataacacacaagtcacagggctttctttgaattaagttggctataagattgtcattaggagaaaaaaaaaacagaaaataaaaacaagcaagaaacaacaacaaacagctgtctccatttaccaatcttcttccagctccttctaaggtcgaacctggtttcacccatggttccaattagtgcctctctggcgatatgcatattattaacctggatagagaagaatacagctttgcttccttgatctcacagtgtaacactgacaagacaaaagttccctagaaaagcaggtggggcggggtgaagacccagggcgcttgcgctctaggtgaaacatttaaaaaggtaacagaagctgccctccttcgaaaaaatgatgagtttgatttaaaaagaaagaaagaaattaacaaactgtgtcgtgtgctgcacatgatcagccatgcttgctaagtctgtctgttggctgttgctatggctacgaaaagccagtggaacccaatgagctctctgcagccgcgctgagaggaccagccattttacttatggaaagcagtgtggcatagagcttagctgtggaagaagcatttaaaaagagaaaaatctttggagagccacaatgggcatgctagtgcacagttattgcagccacgtgtgcccgcaagctggccctgcgacaagctgttgactggtgttgcaattagctgattggagaacggggactgcggggtgataatgctgcgtatccgctcgcgggcagcaggaaagggttttgtctcgggaaagcaagcctgccctgcacggctatctctgcagctccccagctgagagaactcggggttctaaagggaggggtcgccctctgccagcacagattctgtgccaggctgttgcttatgagctgcaggtctgggaaagcaggtgtgtgctcggatgggcactgggctggaacgcaggcggacgctctagtgttcacctgcttcctgttaacagactggttggctcacagagcatctgctcctacacgctgaagctgcagctgagaaaggggttccgggcatcccacttgactgacggaggtaagcttttccccctcttttgaaagctcagcataaaaaaataaatgaatgaatggaagcaaaagttaacctgaaaaaaattttacattgattgctatgatctgaaattaaggaggaacacacacacacacacacacacacacacacacacacacacacactacttccacaaattagtggttcagatacagagttaactcggtgagttgaggttccagaaattgtacgataaagggggaaaaaagctctgctgttttgggttaggatttaaaataaatatttactgttttaacaaactatcatggcttgtctttctggacagacctgatagccaataataacctttctctccgccagaacaatggattcttttgtgacttgccctttgacacgttaaaagaactacacagcaaacccgcagaaggcaagctggggaacatttgtttttaatcctcataaatgttttaaatctttacacctatgcacacctttaaaggagggaattctgttccctatataggtcataacagccggtggattttgtacttgcttattctggacggaatagcccggtgtgctgtttgatttagtccccggcagttatagagcaaacactgtaggtattgcaagttgctcacacctcctctcccaatatcctgcatgccaggctaccccagagcacaacacccccattgtactccctaagctcagaatgtagggaaagaaaagagatgaagtcttggtgttggactcaagtgcctctataagatgtggcaggaaaatttgttttcttgcttctttttcttcacaagtagatagatttcataggacggtgaaagagaaaatatcacatacttccatacttccatacagatgcacacactaataatgggagcgatgtcagcggctggccactggctgaaagtgacacggagtttgcattgaatgggggatggcccctctgtgagcattgctgtgctttatagtcacttaggaacaagctggtactggggactgaaattggtcagccaaatgaaacaccctggagaggaacgggtcaaggaatgagtgaattctgccttagcaccatttcagccttttctaagtcagttctaccgccggtataccaggaatgttgaattagtcacaacgctgttgaaaatagtaaaaaattattggctgaaaacttctgataacaactctatcagcaaaagatggagtttgccacgaggtttcaaataaatagttatcaaggtctttttccaagaagtaatttattatttcctgtcttttgtggctaaatatagattggataaggagtctcccaataacggtaattgtgatgtctccattgatatatgtggacacaaatcacctgtttcctatgttagcgtaccctcagagtagcaagccataaagcataaataaggaggggatgttttataattttctttttgtcatcagtatccaggatataaagatttagactaagaatcctcaatgcagagatacgtgaatgcatgctggataaggaagcctgggggcatggcgctggctgggtgtaaaaggttctatgggataaaaggctgaaatgatgggactatactgagtttagctctcaaggcaaagtaaccgaacagatgctgttaagtcaaattctgtgtaaaaaatctctcagccatgtagatcattcagggagaacaaaatggacactgacaagagcccctttctgttccgttctttttttttttttatgataccgccaaaggaatcatcagacacacccaaggcaagaaaatcatacttttctaatttctcctggggtaacctttagaacaggctgtgggaatacctacagcaacacctgaggggtgtgccttgctgcctgtgtagtatctttttgtgggacaggagcatgtgagctcacagaaagacacacaggctccagctctatttccccatgttgctaaccctgtaaggtgtcagtcatggtagaccagcactccaaacccattctgtgcagcacaccaacagctgttagttcaacagctcttaagaacggagaagttcagcgagtcctcatgtctccacactttgcttgctggtttttgcttagttttagttaaatttctgccatctccaactctcctcttggcaaagttaaaatatcttataatttccaaaacacatgacgaaacaaacaccctctactgtagctttccctttagctcttcaagcagccacttttggtggaccctccagaacccagcaaggatgcttcccctacaggtccttaccacatctagcagcccactcgactctttctgtctgctacagcatcttgcttttgcttctgctcacagctttccacggtcttcctgacctccgattctgcagcatttagaaccttacctagcatccagacattccgttgaatgagtcaggcttcactgttattgtaaatatacaccttgatctagtattgccatgaatcagagaaactcaaaacttttttttttaaggcatcaacctgtcaggggtgagagtgtcactctgggacaccagtttcataagtacattatgcacatgggtgtcttatgttaactagtcattttcataaattatttcatttaaataaagtgacaaaagtttcaggagaaaaataataaagtgaccgttcttatttgggatgtgctctcattggacttttcactggaagctgagtataatgtatgacatataaatacttaaggaacagcttttcatgtggaagctgagaaagggaagaggttttgagcctgcggtggggggggggggtggtgggcaggactgagaaattggagcacagtgtctagtaacaaagtttctttccattttcctaaataaaccttgaaggtaaccggctccctcatcagtcaatcacagatgcctcgcctccccccccccacccccccgccagtgttagttcgaatgtgaggcgctcactcatcagtcaacagtcaaagtcaacagtcaatcacagatgacccgcctcccccccccccccccccgccccatgttagttcctaggtgagggagaggtgtcactgtagctgtagacctggttttaatggagacttacttttttccccagataaaggcataattctctttttaaaagaaatattctgattacctttctgttgcggggaaattgctagaatggtgtgatgagacacagggaacttcatgtacagtttcctgtctcttaagatacccatgttcaaggcaaaagtagccattagtttggtgtgaatgttttatacataaagtagctcagattagagagtttaaaatagtcagctgtttcaaattagaagggaaaatactagaaaatacttaaattcctatttctagacattttaatatctattccagatttgaatattctagtgaaaatgtgttaaatataagttcctcatgatcgtgctgggctctaagggtttatgttgactgtgttctgctggtgttaatgtataccatgttataattaaataatagagtaagcttgatattcattttaaagacaaattaatcatctcaagtcaaatatagcaattagattctaggaaatataatctcccatacatctgaatcacctacatattttatatataagaatatttaagagatatatctaagtaaaatgttatatttatgtaatatcttatacataaaaatatttggtagtgtagtgattggcccccttgtgtttttcagtaaagagttataatagataactgcatttgataattttctgaaagttgtacaaagggatataaatcattcaaaaatgcctgttgtaaactatacctgtcgagaactatattgtttcaaaatatctataaatcatttctgaaaacgctaagtcatgtattcagctgtagagacgcatttctgtaactgttgatcactgtaagtagcccaataactctgatccggtataagttccatcaaggttataaatgttggatggaggatggagtacgcttgctaagacagggccggggaagtcttacaatgtgtcagacttagatcaactattatactttccaatcttcaaaacagaattgttcattaaataggaattttggccaaaagacaccagttttcttctccctatttgaatcaagtatatgtaggcctaccattgcttctgcttgctagatttcctttgagcaaaattcaaagagctgtcattcttcctcaatctaaccaagaaacatctctaagaaaatatttccattcccctcagatataaatgttagcaacatttcttaagttctttttgtgcacatattataaatataggaaaatcaaataagaaagaggcttaattgaaatcttcagggacctttaaaatgcatgttcgtatgtcctcttgttctggggatgtctttatccaatgcagacatttacctcctctacttttcctttgagaagtgttcacaaaggaaggcaaatattaaaaagggttttcctataatgaaccatgacctctttcttcagaaggatgtaactttgtgcagtagtaagaaagcagcagttcgcaggcttagcttgggctaacattcttacagattatcaaagtgagtccaggccgaccaatggccaaccaaaggccaaccttttcagattcctttcctactcaatctttggtaaaagttgagagcaggggccacaaaaatgtttctgattccatattccctccttgttcttctccctgtggcttccttgagagcaatgtttctcagcctgtggatggcaaccccatttggggtcaaatgatcttttcacagtggtagcctacaacatttacattatgattcataacagtagcaaagttacagttatattaagtagcaatgaaagtaattttatggctggaatgcacccccaacaggaaggttgggaaccactgacttagaaactaaggtgtttgtaagggttagctatgaggaccaataagctacaacaaaaagggacttctgaccaagattgccaatttagaaaattcctaacagaaattacaaatgccagtaagactagagtgaagcttttttttttttaagtgcacagaaaaaacaaaacaacaataacaaaatccatatatattctggccacactggagaaaatacttttgtttaaatgttccttctatcctctacaaagcccatgtgcattttaggtctcccaggaagtgactggcattgaggtgacatccctataaatagaaatgtgcctacacttatgactacggggtctttctccacctcttaactaagcctcccctgcttccggcctcattaggacgttgaacattttacaccctgtacccatacttgataccgcttaggaaaagaacccaacagtaacaacaagaagcttagggagcccacagtggatgctgaagtgatgacttcttgtggcttgccaatgcgccaccccaccttattctgtcattttctgtgctgaagttaatcaggcaaagaggatcaggtcacagcaaccccatctgtgtttgtgctcactgtgtagtctggtgaaggtttagtgtactctgaaacaagtgcacataatctgtcagctacataagtgtgtggaaaattccatagtttatgctgtgagagtaaaaaaaaaccttttgaaaggacttgtctcttactagccagatctggattttttttcccctttgttattgttcttaaggatttacatgattttatttgatgtgtatggatattttccctgcacctagcacttacaggacattgtgtggtacctgtggagtccagagaggctatcagatccccttggaatttgggagttgcagaaggttgtggactaccacatggacgcaggaacttaggtagccacggttctcagctagagcatcagttgctcttagccactgatccagctctctgactcccttgacttctttgaaagaggccaggctggcttccaacccctaatcctcctgcctctgcttcctgagtactgagattgcaaacatttgctaccacatccagatagactgccagatctatataaacaacatagtggtcaagatgaaaatgttagaaccaatcggttgttccaacagcgcagatagtcttgtgttttgtgtgcttgtctgctaggttagacaattttaggtaaggggaggtcatgtgagtacctaaggttaaaaacaaaaaaaaaaaaagatcaatgtttggtcagaacaaaagtggcaagcaaaactggactccggctttagaatggcagctgggacattgaaggcattcaggaaacaggttggtccatgtactggctagtttcgtgtcaacttgacaaagctcctttattacagagaaaggagcttcagttgaggaaatgcctccatgagatccaactgtaaggtattttctcaattagtgatcaagggggaaaggtcccttgtggctgggaccatctctgggctggtagtcttggttctataagagagcaggctgagcaagccaggtgaggcaagccagtaaggaacatccctccatggcctctgcatcagctcctgcttcctgacctgcttgagttccagtcctgacttcctttggtgatgaacagcagtgtggaagtataagctgaataaaccctttcctccccaacttgcttcttggtcatgatgtttgtgcaggaatagaaaccctgactgagacagtccattaaatcttcagtcagcatagcaaatgaatagatggcccacagtaatcagatcttctgtccacattgtcctgatgctgacatgtgatttttttaaaaggccatttttactcagagataaaaaagcaaataaggagacgtttcttattttttattttattttttgaaattacaaaacagacgagaaggaaaaaactgaaaattttaggaaatgctattattattttttaaagcaaaatatagtcttcctgaagaaaagcactcactgagctccaacagtttcataacacaggactactgccaggacctggggaaagcttaaatgtatcttggagtgtcatgaataattcagacaaggaaatgcgatttctgttccttctaaagtatctggctctattcacacccattgagaaaacaagatcaacgagaacgaattcacatttgccttctatttaaaatagcgtaaggaagatcatttaaacaccacaaattctaagctttttctccttatgcttcagagtataattagagagcttaagctaggaaatagtgtcaatttagggagatcttttaaagttgaaaacccgtagaagctggaagaccttagataagtaatcaaaataacagcttccaaatggattcaagaaaacgaaagctcagatacttagcattcggtaagctagaaaaacatttctgtttcaggtttattttattttataattatatgtacgtatgcctgtgggtcggtttatgttcccgtgccagtgcctgcagagttctgaagtgtctgatcagtctgtggatggtgttccaggtggttgtcagcggcggggcattggtgctgggtttcaaacctgggtcatctgcaaaagcagaaaatgccgttaacccagaggcagggctccaggcaagctgcagaaaatattagtccaaaaatgatccaaaccaatcaacctaaggatgctgtaaagtaagcacttgccccatgctagctactatcctaagatctttatgtgtgttaactctcacagaagggctggaaatcatgaacacaccaagaataggcacttttcaggccatgtgactcagcagtgctcagcaggactttcgtgatcggtcagctgaagaaagacttaacacagtcatctacctagttgttccttacactttgcccattgcatctttatgccatttaaataaagctattctatgtatgtctagtcatcccatgtgaatgtaaattccatgagaaaacaacagtgctttggctgtttactgcatcatggccttggccagaagtaagtggtggctggaaagtagactgaatgggttgtagacagataggttcctgtctgtcaatataacctgtgtgaaagaatagaggttaaattgaagtagggagaaccgattgcttttgactttcatcatgagaaaattcatatggcccatatgtcttcagatgctctttttgttaagagatttttgtgcatggggttcgtgccctttttaggtaaaacactaagctaatgtctcaggaatcctttgaagtcttcaaggtatcttgaacaaaggaagccctgacacaatagaaaataacttggctcatttagcacactatcaacttccccacaatttaatcttgaaaacaaccagccttgtggtagtgacatctgagaattaaaaaaaaataaaaaataaaaacagcaaagagtagagtcgtctgatttactaaagaaacaagagtcatcccttttcactatacctgtttagggaaaaggattttcttagttccatgtcttaggcactgagggtacatcctgaagtctctgactttacatagaaacatgtcttttcagataagatgtggtctgaaatctgattatgttcttgacttcctttctaccagagctttaattctataaaacgaacctaactgattacagtttcctctcaattatgcaaaaattcccttcccctgtatataaagtatttggactgcattttaaattaatttttagatttattatcaggacagaagataccaccttcttatttaataaaagcaaatgataatctaagtcataaataacctggtgtagtttgaaaaaccatcatccttttgacccagtgacccactagtgctccacagtaactgtgatccattaaagtcatttgacttaagctgtagattattatggaatgttgtattacttcataatcatttgaaaccctaaattttttcttcctttgaaagaaataataataataataataaaaaacatgccctcagaactcttgtttcctccctttggaactcggatatttattttcatagctgttggaaatgcaaagattaggatcatcaacttgactcctagaggatgttctgtctgtggactactggttcccacactcctcagtgttttattgcactcggcttctactccagtctgtgaggagaggtcctgcaagtccacagtacagaaaagacccacaagtaagacaggatccggaggggcttcagcatgcaggcaggtgtgccatcctttgggtcacccaaccgaaggaactttcaaggtcagaaagaactaagaagagtgttgacttgaaagtcaagtgtttccatttctaactaaaagcaaatcatttccaagaaatctactgtcgttctagatgatgcatcccggagcaagggagaatattttatctggccaacaaacatagcatgactccttgggtgactagcatttgaaaactcaacttcccactgatcaaagaattcattgatcaggacattctctggtgaaataagtcagtattctacctggcaaatataatgccagggggcaaaatgattttaagaccattatcaacatacttgctcaacgacatacctgtaccatgagttcatacttctaagtaaaccaagatatcaaggaattgtcctctctggcagataagcatgaccatataagcacaggtttttttcattttcactttcaagacttttaaagctagtgtctcaattgttgagttaatacaagtgagctggttctaccctttctaattctatctagttctgaaaagttcacaataaagggaagtaattgaggtgggatctcagtggctgggaataggcactaaggggctggcttcaatttcactgggttcgagttttagctctgcaaagagataatcaataaagaaaagtggagaatgagagagatcctgagttctgggtgcaaattaaaggagataccagatggaaatgcaaatattgaaactataattacattttctattgttgttgttcttctatttttaaaacagaatactatgtagctccggctgtcctggaactcatcatatagatcaggttggcctcagactcacaaagatcccctgcctttacctcccaaatgctgggactaaaagatacactaccatgcccagctgtaactgtgtttcagtgttaatacttcccgaattattaatctgtttgtttgctccttgtactcctatcagggaactaccatgtgtttgtggcagaggaagtgatgagatgttgacttaggaatcttttaaaggagttcagttcaatataacaggaatgctaatgatgcagtaggatatagaaggtgatagtctgatatacaaaggatacaaaagtaacacatggaacgtctttgtcagaggagatgacaagaaaaggctctgggaagagagatttcttagaggataagggaaggaagctctgagaaatatgacaggggacatcccacaggatcggtgcacacaccattcataaacatcagcagcgacctctctctttttaatagttgttaaagaaattcttgatacttgctttccaagtgcctaaaccctcacttaatcaaggcctgactttaatagcatttaaaaacatcattaacgagactgtaaaccagtgtacccatagtgggagacagaatgaaaattcttcaaaaaattacaactaccccgtcttgtttattggaagggttgaattggagcttgggggatagtggaacaaaattcctgggacttagttaccacttctaaagtaagcaagactttgggtgtgaagatcacaaagatgtagactctatataattcagagtaccataatctgacacaagggaagttctatacatgttagctgccataattattttagccaccgttatagtctataaatgttgctgattttagaagttcacagaaagactctgcttacctcttggtccttgaccgtcttgcaaagtcatgcaggtggtatgaagggccacctctactgccctctttgatgaggtctgtggataaatcccagcaggcttatgcaatgctcctctcaaggatgcatcattgggacagttgagagaaaagattcaggagtgatcaagtgtgatactctcaaccagagtggaaagagatgggtgagggtgtaagcagtcaggacttggcatgcttgctgaaaatgtcttcttaaaggcacctagcaagcagctaggaatacttcagctctcagggagaaatgaaacaaatttgagggccaatgaaggctctgatgttgcccacatgaagagagcaggaacagactgttgaccacatatagcttgactgtattgcctctgtgggagacatttccccccactgatgcttgcttgatcaacaaaagactgcaaacaagcttttttagttcctctttcaaacacagtacacatttttgcactactttatcttttaaatttttaattaaaataaaattatataatgtcctcccctccctgtcctctctctgacccttcttgtattcacttcccactccctctcaaattcatggcttctttttctttaattactatggctacatacatatgcaaataattatgtaaatgcagcccaccattaaatataattattcagtttaattaagtaacatgttctagttgacaccatttttcccatttgccccatatgattttaaagtaagtgataataatttttccttgttttaaaagcagagaatttgactgatagctgcaattactatgaagaaataatgaatattaacaaagtcagcatattagccaatttttagttatcttgctcttaaatgttggacagaagttgtttgttttccactgaagttaatattgtaggttatgcttcttgtgacaacaacaacaacaaaataataataatataaaataaaaaaagaagaaacaaaaaagatttaaatgataaactatttgaaaacatttggtgcagatcaaattgaccgcatactctgattgtgtacaacggagacgggtgtataaaaatgctaacgagaagttagctgtggcaagctgtggtggtgcgggcctgggaggagtcaggagaggacagtcacaaggttaatcccagcctgggctacatagcaagattctgtcctacacacacacacacacacacacacacacacacacacacacacaaagcaaaggttagggagagaactgaaccctacatgttgtcctctgaccttcatatatggtgtagcagcacacatgcatatatatatgtgtgtgtgtgtgtgtgtgtgtgttcatgtcccacacatatgcactcacaaaacatgcaagtacaataaataaatgtaagttaaaaactaaaaatcaatcaaaaagaaaacaagttagaagtgggaaggagagagagagggaataaggaattgaaagagggagggagagaaggagagaggaagggagagagggagggagggagggacagaggaagggagagagggtgggagggagggacagaggaagggagaaagggagaagagaaacaagtcctctgccattcttgtagcagtgacgttcattggaaggaggacactgattcttctggctgtgtgagttccctggtgactagctagagccctgctcttgggaactgttcacagtcatgtggacagtcacacagcatcagagagaagtgtccaaccattcagagggcatgcacaccgaacagaatatggctaatcttacctgaactgctttaagacaagtacaaggcaaagacaggttttgcgcacagtgatcctgtatgccggtgagcatgaaaagaacatgggaggttgatggataggtctgaccagaagaacaaaagtgtaaatggggcttggtatgttgtggccattgacgtcaggtgaactcgggattctttccagccccttgatcgttaactcagagaattcgtaccaattcttggatggctttagctctcttccctactcatggacgttagcagtcaccttttagaaacacatagtgaagacataatgagatgatggtaaagagaaagtataatgtaaaatgactgactgtggagctgggattcattcagtcaaagcctgttactaaccagtcactctcctaagataatgcatacataatgaagtttggctaggttcaaaacaaacgactaaaccaaaatagctacataatagagattaaaaatgcatttctatattaaagaaataaaacaatactataaaacttaccgagtttcgatggttgcctttttcttagattgctatagtctcatctccaggagtgcagttgcacatctctgtatcttcctattggactgttcgcctcactaaggcccactgttctttcaacagacaaaaggaaggaagaaagacagacagacagacaggaaaagacaagaaaaaagacaggaggaggaggaggaggagggagggagggagggagagagagagagagagagagagagagtcagtctggtcatgaacacctggagagagggggaaggggaatgggtggggggcagcaaattctttaaacatctctcagtgactattcacaaaaagactcccaggaaagtattgttctcatcttacagaagatgacaaggcctcagagatgtctgacaacttgcacagggtcacacatatggggagagtgggactcaaacttgggtccttgatgttccaaaccctgtgctcttagtaggtttcaaagctgcctatttgtgggaactacaggccaaccaaaagaaattgttataatttacattttatcagtctccctatggttttatacatgggttctacagaaatatttgtttagaagcaaatatcaattttcctcttcaaaggtctcaaatagcataacaataaaaagaggcaggtaatcagaatctaggatgtcaataatcatttttttatattctgaagtatagttgatttttacttttctttctttatattattgcttgtctatatttgggggcagagcatctcatgtatcccaggctggccattaacatcctatgtagccaaggataaccttgaatttccagtccatctttcttcttttcccccaggtgctgggattacaggcctgtttcaccacacccagttttatgggttgctagagatcaaaccaagggcttgctgcatgctaggcaagcaacctccctactgagctacagccctagcccacttgtccattctttaaagaatctagttcaaattctaaaaatttaaaaataacaaaatacacctaaaataaacaaaggaaatatatatgagactccagctgacatttagatagctaattacgattttacaagacaaagcaatatgaaaaaaaaaaggttaaactatctgcatgtaaatgctttatcagttccatttatttttaaaattggcatccatggtaatttaagagattatgtgcaccactgggaagttgatagctgctaacttgacattctgtgtgcgatgtcagcagcaccctgtgtttgctggcaatgaagatttaccctggattaacaatgattggctctacttgggagctgagtaagttcaaatggagttcagaaatactcaacagcatgtacccatgcgcacgtcaaatagttcttcttgagcatagaagaccaatctaaggaagaaaaatggagcactggaaagcatgtgtcttgggagaaaacccttcttactgtcttcacattttgagggtagtatcaagtactataaatagaaagttagcacactagcttatgtaggtttcattactcaggtaagtactaatatgttggggaagagaaattcatctcacccctctacaaaaagaaaaattaactaggactgtttgatgctcagtagaaaaacctgcctagcatgtatgcatgaccttttggctgtaatccccattaccaaaactaataataataaaataaaacaaagcatagtaatagaatgagtttttccacaaggttttggtacacaattcacattgttacaaggcatggctgaggctagctgtgttcctccttcctctctcacggatttgtcatcaacacaagttaggtttcctcaagaactaagataacatactacgagagcaggtgaaggtccgtgcccctgtgtgccttctcttctcctaaggtctttgtatctgcagctcatttgcctgactcatgaatggacgagtctgcataaacaagacatttttgctaagtgtttactgtgttagcaaatatggttccagtatttccttctcatgtaggtgattgatgtatacatgcctttggaaggtagtaagctatgccatttggctttgctctttctaacgagtagaggtaggtagttttaaagttgtgttaaaagcagcatgctttcagaaataatacattaaagttgtttacaaagatggtgattttaataagcaccaacatttcatatttttaaaagtacagtgattttcttgtattgcttctgtttcccactcatggcctccaattgattactcaaagttttcagaagtcagacactgggatattcatacaagcaccagagtcatcctgttggcccatgtttgaaatgaaagcgacttcactggtacagagtcaatgcctggtaacaaatgttgctcatttcaggcaaatgtgagccttcatttaactgggtcccgagggataaacatattttagagtctttgagaaccaaaaggcactttctgtcagcccaagggattggggcaggaacagggatattaacattcctaacattcagattctaaaattccttttctgtgaagagaggggaaggggtatttaagtgtaactggctgcatcaatcacaaataaaatgagagtctatattgtctctctcttttatgtataaaccattgcaattttagaggcatccatctctttgggtactttgcaataatctctgaattctttagcccttatccatttgaggcaagtcattagaaatgacacagagccttgtattttacttggaaagccacaatgagtaacatgtaagtaaaagaattcagactgtttctgttggtctttgtgagtacggacagttcttagttcccgccttaatagacttctggtatacctccttcattgttcctaggttttgcatgtttatctcagtgctggtttctctcaggacaagttaacagaaccactagagcagtgggtggagataactgtaatcaggagtaaagctctgtatgtccttgaaagctgtaaaattagacatgcttccttggcctggaaattagcaaacgccatttctaacccttcccagtacgacgagttcactgttgtgcagcaaaaacacaagcagcaaatgaagctggtgccatggaaatagtcactctgacttcttcacagcagcttaagtttgacctagttcttatgtgggaagaaacttcagagtcaaatgaaatttctaaatacactgggaaacagtgagacatggcccagaagcaaaattgatgaagcaagccctcatcttaatcatgtttatgaactctaaatacttaaataggaatgggatcaagtattacatcactaatcagggtgatccactattgtttctcctttgaatgactctattgtaacaaatgaatatattctgaagacacaatgttacttaacccctttaaaagaagagctagaagagaatgctaaatgaaataacgagtttatttattaagctacatttgcacattttcttatgaaatgaatttaattatcttatttattacatataatcactaaataatatatgtcatgccccgtgtagttacatgatgtgcaaggtaccattatgaatactattttattattcaggtgataaactgagtgaggatacataatgaaaacactatgcctttatttttaataactccatcacagaaacggaaaactctgagtacctctgcagttcattcatctggctacagtgagtgagataaatgagaacgggggttctctacagggctgcttggaagtggaaggaaatcaattcatttcctctgaataataataataataataataataataataataataataataataataataaatgtatctactagtcatctcggggtggtacaaaagtaatcctcaaaaacagaccttatgctgatttttgaggattagaaaaagagcaataattttatatttactgaaaaaggaagaaaaaaagaacaaaaacaaacaaacaaaaaacaaaaaacaaatacattacaatagagatgacctgacctggtctggatcagtaagttaaacacctgagagaatcactggagtttgtaacccaggaatcttgtatccgctggctcctgtaaccctggaaccctgtatccactgactcctgttcttatgtttataggccgtggtgtttgttacaacttgaagtttccaggacctttgtagctacccaaaatagaaggtggagccttggtccattttggagattcaaaggtgtgttcaaatgtgtgggagtcttttaaagaggccaagtgggtggatcctaatctagtaacacgaacatagagttcacgttacaggatgatgatgaagctgccagagtgcactgctcaggacgggtagaatgatgggtaccattcgtcctggcctttctagttcctccttcccttacccaacattgtaggtgcaagtccaaggacaaccgaattttgaccttttttatccgtctttgcagctaggtttgattgcacggtataatttttagatttaccaataaataaccctcaaatagatgacttcagctgagactttttttttcagaagcatttgacaaagtatccctcacattaacagaaattaatgtatctctgagaattacctcgcttcttgaatcatttttctaattattctgcataacattttctcctctgataactgactctgagatcgttttgcccgacttgagtcccttctttcaatgtgcctcattttcaacttcagcgctccaaattttgtctttctctttagaagatattctatttctcctgtctcaaattgttgcagttctcactgactgtgctgttggtgtctcttttcccttctccatagaagcctctttttattgttccatccaagctagcaccggatacttaaatgagctggctgttgagcccagcaagttcatcaaggtttgaacagcaagtctctatcaaggctttagggggaaaaagaaggcagcacttggcagtggagcagccctggtgtacctggcaggaatccacaggaacctgtgggaacattagcccatcccaaataagtgagcagtgctgtttgtggtcttctgtcccagacaggaacgatggccctcagcccctcactcagtactggttttcctatgcatgcatccttcgcactccagtttccaaaaggtgaaacctcattggcctcagatgtttctcccaactatcatttaagatgacatgaaaagtgacagatacataaagtcaaaaatcggtcctgagagtctccagaacgtgtcaggttttgtgatgtgctgtatatagggaaaacatgctaaacatatctatggatgtgtctcactggactttgccatataaataaaataataaataaataaatacataaatacataataaatcaatcatgagttcctaatgtggagatgctggcaggggagacacagaatagaggtagaggagtggacagaaatcagaaatgagatttatacaaaatggttctggatttaattaaggcagacagcactcatagcaaccaaggatctaaggtaatttctctctctctacaaaataaaaaaaagatgcaagtgtgcgtgtgtgtgtgtgacaagcccatttcacgatgctgtttataaaacccccagatagtatgaccgtcaatgtgacaacctttctctgctctttatagataaccactcctctttaagtcctgttggggacaatggtttttatttaccatttattagatatcctctgtggtatatctattcaattagccaacgtctgttttcacttaagtcttttattccttattaattattgctggcattttaatggccctttcatgttaaccctctattcgataatgaattcactcatcacctttagcaaccaggtactgtagacagatatggctgccttgaactttttagtgctcttatttattatttgggggtgggggtatgggtaaacatgcttacagtccaggtaagcagggcttacaggattcagttctcttctcccacccaccatgtaggtacctgggacagagctcagattgtccggcttggcagcaggtggtgacccattgagcatctcactggtctctattcaagctttcaaaaggaagctcctctcctcaaagagtttctagtctcttaggacagagccaaacagctgccatgatagtacctctctttctatggcacacatttacctagagtcacttttcaccgtctcatttaattctttgaaagggctctcaaataggtagacacagttgtctgcatgttatattttatcaagtaactctccccaaaatagcatggtttgccactggggaagcaaagccccgagcccagcactgactgattctaaaaggctacactcccctcttttggaaggtaatcaccaccttagaaggcagatcttggacttcagctatcattagttataattactgtcacccaacataggctagtatgtgtttgtaacaagatgcaaagggttataaatctgcaacgtgtatgatagattctcctctgctttctaaaacaagtcgttcctttgataccaacagcattccacttcagccttcttagcagatgagatggcaaagtcatcgatttgaaaaaggctatcccatccgccccaggacaaagctagggaggagatgagaattccttaatctggttgctgacaactccatgaactcttatttaaaactgaaacaagaaaacaaagcaaaccaaaacccagagtgtgagctagctgaaatgaattataaggaagttaaactcagcaaaactaaaatacataaaattctgaagctaaatgagtacgtttagaaagcagttttctatgtagcttttgaaaattgctatctaatgattactgtgcgccaggagtgattttgcctgcacgatattcttcagttcactataaagtgctctcagtcaggaatggcaccccatttccaaagtgaaggaattagggctcagatgtttccaaatcaaggagtgtggaagaatttatctcgaacgctgctgagagtcatgactttaactacagtgctgtgtatcaccaaagtgaatgaagataagccacagcaaccaccaccacttggacagcacctactgtgtgccagcactgtctgaatgaagataagccacagcaaccaccaccacttggacagcacctactgtgtgccagcactgtctgagcagctttctatatgtattaactcattcttactgcacagcaatcaaattggtaaaatgctgctgtgtttcttatctgttgttaagaatctgtcctggctagtttttatgtcaccgtgacataagcaagagttacctaagaggaggaaacttcaactaagaaaatacatcaatacttgggggctatagtcagtgttgtaggtcattattttttaaataattgattgctggggggatagatcattgtgggtgatgccatccctgggctggtagtcccgggttctataagaaagcaggttgagcaagccacgaggagcaaggcggtaagcagcaccctccatggcctctgcatcagctcctgctgacaggttcctgacccttctgagttcttgccctgacttccctcagtggatatgattcatatcatgattcaggatatgtaagccaaataaagccttttctcctccagctacttttggtcatggtgtttcatcacagttatagaaaccccaaggcagcatcccagggcacacgtatcaaatgagccgccacagtcagaaacaatcgtcagagcctacggtagcagccaggttcttcagcttttaaaaaattaaacaaaacaaaacaaaacaaaacaaaacaaaacccatcagggactctatgccatatcagatgtgttataatttatccttattccttcaactaaggtctttaatcagaaaccaaaaaccaaacaaacaaacaaacaaataaacaaacaaaaacccccaagactctttagaataattcctgtgtacatcctcacatttattgatgggaaacagtgggcttcctaatccaatatagtttcacttcagttatgagtggcaacatccactgttctcggaaaggcatatgtggaagtgttcttgctggcctagaataggttttcaaactgtcttttttcacaacaaggaaaaatcctgtcttttaatttagattttgaaagcttggggtaagtgaccccgttcaaagttttctgaacaatgatctggccatgttcaccaagaacaggataaacactgggttcctgttctgggtttcctgacaattagtgccgtgttcttagtcctcttggcatcaataatcactaaatgtcgggtcttagaagagccaacctctttatggtgcttagaaaaagaaatgctatcacatttgaacctcctaccgctccccatcgtgactgtatttccatggctttctttactccagtgggcctgaaacctaatgcatgagccgttgtcagtagtggtgttgatatctagacattgcccttctgagtctatttttacctgatatcttaatggcaggcctaatagtccctgctatcttccagccagcctgatgtaataaagttgttcttagatggttgtattcactgattttaaccgtaagaaacagcctaactccatgcagctatgaaagccttgaagaggcaggatttgcttcagacaaggaacccagactaaggcagcctggtatgcactcacctccatttcctgtcctggaatagcagccagcaaaccaacctcctataaaacccagcaatgcttctgttcatagtaggagcacagggcaaaatgacatgggaccaaaagcagcctgctgggggagattttgtgttgctactgtgtatgtgatgctctccatgccgtgtagcttattagacagggcaaacacaaggaaatatgagaaagcgagtttctaaccaggcatactctccagactcctttgtaacgaagaaaacgaaaaacaggtcctcaatgtgagaaaacagtgtggcccacaaacatgttctatagtgtaatcgttctaaagtataatgaacaaacatggaatgttgacttgattgtaaaaaagccaaaatgactcaaggggttcctcaaaccaaaatcatctttagaaaaagaatcacttaatgagaaaatgcaggcactggcttgcctgataaaactgtgaacattttctaaaactaagatgctacttcttactgctgtctgaacataccactgagggcaggttggaaacccgtccctgtcggcctctctaaaccagtctaaactagttcaaccctgagaatataaatgaatattcaacaactccattattttttgtacaactgagttaagattactcatttcttagcactgtacaactcattcctgccgcttccttttgcaacagaagcattgctggtttttgtaggagattggctttgctggctaatgctgggcctccccaaattctttgtgtaacgatgtcaggaacaggagagtgattgtagacataccacagccaacaaaggagttgacaaaaagccacaagtgacttggtcgaggcaggcgtcacctcggccctgtctgttcatctgagaatgaagagaccagtgggcagcattgggccacaggcagatctgtatctgggtggataagcatgcaacagggggcagaaacagggaggaaggctttggtaaagggaagtcataacatagacgatactcacacatccaacctacgctcatggggagaagcttttactatgtacttaataaaatgggtctttttgtctgtttgtctgtttctgagacaggatctagctatgtaaccgaggctggcactgaacttgctcttcctccaagtcttcccatgtacacccccagccctgctaacttttgaatgctggtcaactgttctttatacttcatctttatgagttagaaggacacttttcttgcattctgtgtactgtgtgtgtgtgtgtgtgtgtgtgtgtgtgtgtgtgtgtgtgcgtgcgcgcgggcgcgtgagagagagagagagactgtgtattatatgtatgtggtgtctatgtggtctagtgggaaatgtcagcctccgtttctcctatacatttatttaataataattaacacacttcaaagacttcaaaggaattgtgaatttctaccaccaataagcacccagctaggttgcagtggatgacactggggcatcctccattctaagttctgacaccatgtagagtcttgattctagacaatagaatcaggttctacaggctatgggctccgtccccaagctttctgatcttcaggcgtcagtcacaaacagttctacccagcttatgagctatcaggatctccacctccgctgcttttgttcattttattttctagcgtgaatcaaggcctcagggggaaacatattaactggtttattgtgagtgatataaaaaggatacagaggaagaaacatgcatgtagggggatagctagggaagagtatactccctccaggaacctccccttttccagctgtccataaactctctgaactctgtcctttatccctcctagaggcgccattgcttagacatgcagagctgatttaattattggccactggtgatcaattaaacaaacccttagctcctctcctttccttgatgaacagagaatgaagcttacagtcccaatcctctaaccttggcatgatctttatatgagaagcccccacactgaagcttcccagtgatagagatcagtcgcctctgtcccaaggatcccaggactagtggctagaaatcaggggtaaaaatccacttatatttcatatgcaaaatgaacccataggatcccataatgataattgctgaaatgtgccgtgggtcattgagttaatttattcatttatttaatgactcagaaaacatattttcctcctgccctgtgatgatctcagtatgttttacatattatcaaagaacattaaaaaaaaaaagataacgcatgttaaaatattgtcagcctgtgccaagcatgtctgagtccagtaacacatagctcctttgcaatatgcacagtaaacaccacctcctggatggcctcaatgaacctttgactcctgttttgcagcaatggccaccaactttctcctgtcctcttttggtggcattgatttgcctctttgcctgaagacaatattgcgtgtcctctggattctaaagatttgtttaccaattcatttgttgttctaaccaatgtatacatcaagtgaaaaagggtttcagaccatgagaggaaactggtatgactcttgttggtagcattgttggtacaacttaactcatgcctaactctatgtttagaaacttcccttttaaacatcaggcatgccatgcaaacaaatggtataactacctaataaaaacaaagaataatagatctttctctcaattataagaaatattccttagggaccccacctgaggggttcatccactcaacagaatgtccgatggttcttagaaaagtctggagatatgatttatgtgtgtacagaaaacggaatccaaatttattttaaaaataaatacaaattatgtagacaacataatttattaaatccaagggaaacacatgacatttgcctctcccaacagatttttcactaaatatgtaggtataaagaaacttcctaaaagtctctgtggttaaaaacatctgcttagttaaaatattccgtaagatttggtggaggggggatgtctttcataagaaactttattttacaagttctggcagatatataaaaaaaatgcacttgtgttgcttaatattgtgaggaacttattaaatcatttatttatccatccaggtggtgtggaggacttactttatgcctggggcagacccatggtgatcacactgactaaaggaaaaggtgaagaaaatgcagcagggagcaccaatgggtcatccctaaaataaatgatttgacctagcagggaagaggaatatggctctttaagacttaaaaatgaaccaagtggtagtgacggccgcagcacacacatttaatcccagcacttggcagacagaagcaggtagatctctgagtttgaaaccagcctgttctgtcagaataagttccaggacagcctgtccagaaaaaaacaaaaagaaggaaaggaggaataggaaggaagaaaggacaggaaagagggaggaagagaaggaggaagggaaggagggaggaaagcaagaagaaaaggaaggaaggaaggaaggaaggaaggaaggaaggaaggaaggaagaattaaaatgagataactctacctatctgtgtgggccactgaaagcctttctgaggaagggcatggtgacttctgtatagcattgacggttgaacagggcatggtggtgttccaatccaaggacatcatgtgcgccaaggcactgggagttcttttccatcagcctctgccttgttgctttgagtcagggtctctcactgaaccttgagctcagtaagcccctggaacctcctgtccctggtcctctctctcctagctctggggtgctagcactcacgagatcgtgcccagcttgttaggttggtgcttcatgatccaatctcagctctcatggttgcacaggtacatctcttaactctctctacagcccctcaagtggtggcattaagaacagcaaagttttaactagaaaactgagttttaacaaaagtttaagaagtttaacttgtatctgatagtattagcttaacctctcatggaagatcttagcttcactcgataaaaccaagtctcagggcatgatggtatgtatgggcacaaaataatcttctgaaaacccataacttaccataccacccacaactaggcagtggaagtaatcagaaatatgatgtgataaactctcagaggaacgtatacaacctgagtagaaacagattctaaggctggtaaggacttacagtttagctcaggatgcaagtgtggaagagggctttgcgagtgatcaggcccatcttgggcctctatttcccaactcagaggccatggatgcttacttcggtgcacagcagaccggaggatggccttggacggacgctgactgcagtataaaatgaagagttgtgtttttcttgcacactctttaggttgatgaggatggctgacacaagcaaccccacctacctcccgctttattttacagtcctttggatgccttcctttaattcagctctctcagatttctgtagcctctgtgggaggagaatttgattgacattcttctcaatacaaccttgaaatcggtgccagtgctttggagggtctcgctgccccaaagactaaagcattagcctaagagaatgacacattgttctcccagattagacattgtcactcagctgagggaggctatgaaagccctcaggtggctacagcacaatttacttttctctgggggtgaactctggaaaacaatattcctgggaaaacgaccttcacttccttcctcccgaggttcaccccaaatagtaggaaatgaacgatgacgaagaattcttgagttctcttgagaaaaggatttttacaagtctgaactacacgaatgcaagaagctgcacagaaaaggtcttggaaatcgtcacactatctaaaaataatcactaaatggagccacacacattggccagtgagccattagaaatttttaaagtttttctaaatttatcccccaacacacacacacacacacacaaaccacctgaaaagcaaggcagcagtgaaaggctgggggtgggaggaatttcttgtttgcctctctgttttgttgtgctatgggatggacccaaagccacctatgtgctaagtgggtgccatgccacagagctactgagtggaaagtcctgaaggttgccaatgtgagcccagatagcctttaccagtgatgatttatttttatgaagttctgtgggacatggagcactccggggccacttgcaacagtgaggagtatatttgaaaggctggtgaggttattcaaactctaaactggcatattcatttatttagggtggcatagcagtataggaaagaataacagaatctctctctctctctctctctctctctctctctctccctccctccctccctccctccctccctccctccctccctccctccctgccaaatcatatatctattttaccagttagcaagatcctcccttggggtgcaatcttctaggatggtttggtctatgtaaactgcgtcttagtgaacactgttctaatacggcattgaccccagcatcatctagattcttgctagggagacaagaaaatgcacaagtgagctgcccttcaacatttgcttccactttgtgtccactaatctccatccaagatccttcctactctcatgtctgaaacctattgtgtgtctattcagaacatgtgacattcagtcacggtggaggcaactggtctcagtttggattttaactgggattctcgggtctaggtcccaccttctttcttagagcccacatctctgcttacagttctcacatctccaaaacaagtaaggggctcacttaaatataatcactgatgaattatttaaacctgagttatttacaaaagaaaagagagcatgaatgaatgtaattagtatcgctgttgagataaaagtctcagtagttacataggaaagtcagaattgaccatccttaacgattttaaaatatgcttaagtctaatttgttctccgagacgttgaatgtgctgaaaggagctatttggatccaggctcaggatctttgagaacaaaaaagactttggcgagacacagcatacaacaggattgatattaaatggactcgagaccagacccatgacctctttgtttgagtgtggattttgaggtaacaggtccatgcaggagcaagtgaggcagtgcgtgttccactggattggtgtagaaagtcggatgccaggaatgaaaaagaaatagcggacgtagtggtcagagagtcaatcctcatttctctcattgacattcatagtttctcaaggaaccacatttaaaaatggttcttttaaataaactattatacagggcatacaaaaataattttaagaaatttgtctgagaatagatttcaaatctttattggtagagttatcattcaacaaggaaaacaagtatctagtttaaactggtaggtgattaacgcttgataaaatatgactaatcaaatagaaaaacgtattattctataatgatattttaaacctggtaagtactttaaaaatcaaaactaactttatttaagattataattagatatttcaaatttaagatagagcacacaagtatgtgtgtgtgtgtgtgtgtgtgtgtgtgtatgaatagcctcatcattttatcagctaacagatctcaccactatagcacactgcttgcaagggtcacatgacccttcgtagtctctaccatgcttggtccactatgttttgaaaatcaaccgtgatgtcatttatacaaagaagaaattgggtttgtatttgtctcaaaacaaagtacacaataactggagacccctcttgtagctcttgagaaaaccactgcttcctgacctgctcttatggctctgtgctgcctgataaaggaagagaaggtttcaggaatctatcttcatggaatcaaggctttaaaaaaatattgcatattcacttggaatagccactgcctttccttccaaactggttagttttttgaaacaagctaggggcatctgggaagaggaacccttcattgagagattgcctgtgggtaagcctttagagcattttctcaatcagagattaatgcgggctggtccagcctactgtgggtactgccgctcttggacaggtggtcctggacagcaggctgagctacccagtaagcaccttccctcctaggtctttgcttcagttcctggcttcaggttcgtgccttgagtttctgaactgtcttctctcaatgaaggactgtgatccttaagatgaaatcaacctgttcctccctaggttgctcttggtcatggtgttttatcactgcaataggaagcaagataggacagtgatatagccagggcctaatgaaataatgttgcctacagagtcctttccttcagtcttggtaaaaggagactttgattctgttttcacttattcttgcagcctgagtacaataaacccataatagccaaagcacggtttatctgcccagttttgcattcccagagctcctagtgagctgagagatgcttgccccataaatgctaaaggagggaacatagaaatacaacttctagattgtggttattcattctgaaaaccaaataaaagtccgaagtttgtctgtcgtggttggtgacctggtgtgaatgaatctttttccactgggctttgggaggcagaagcctctctgcttcatgtcactgaatagtcccccagtctcagccagcagataagacatgtcatcagcttaacccagtagctttcaaaaatagcatagttaaagtggacatgtaggtgtgttctagaaagaaaccatttgcctgtggtcttaagaagaggccagtagctgatgttgctacctgagatctaaaatgttgcactaagaccggttgtgagctggcaaggagataatcagaagtctccctcatcaatagaccttagcatcttacttcctactgatcgggtaaaccctttagaaaacatcacggttggaccaaggtacagtgttcctttaagattctgtgtgtgtgtgtgtgtgtgtgtgtgtgtgtggtgttttcaatagcgctggcagttttcctcaaaatttcaatgaatatttgcacaatgaaccaagttgttgtgggtttcctggtttgtgttggtccgcctcccccccccccatggagtgggggtggtgaaacgggcaaggcattttcatccctttgcagacaagtccagctgctggcaatgctgaaaatagctcaaatgagcaccacccagcagctgagattctttgcctctctcattgcgttttctcctgacccccatctccttttcctccctgcagacgcttggattggacttaatcttaaacctctggaggtcaagaccttttaaaaagggctaaataaacactctctacatgtaaaaggccagcgactcctacttcctctgttggagcaactgaggagttcggcctcttctaggtaaggtttttattcggggaataacttgctttcctgtgtggttgttgactagtgtctctaaactaactttttaataagcatcagcggaggccgagggattcccaggtaaacgccgagtgtgtcgggatgtggcagttgcagtaggcattttgtcagtgtggttgtaaactttgcctaaagccctctgtccctgtggcggtggctgcatgcatacagacctgacagaggctgagcactgtctcagagttttcattaggcgtgactgccacagagctgagaagacctgtagacaccgtcattccattgtatagactactttttattttaactttctaaaggcatgctttaaagccaacaaaacgaagcccaccagggcaaagacagcacattagtgattggtcttgatggacaacaaggcggctgcagaagagtgcggtccccactaaatgttgttttagtcactgctggtgtggaatgagacgttgtttaggggatttcagtattctgatcactattgggtttttatatgtctagtgcacttttggggtgactgattttgagaatcccttaccggagctgaatcttatctaagctactcttgtgtgaggtagattttctgacaggtttttctctactgcgatagtaaactttttttatggatagttttctggctcgcctccttcccacctccttctgctttgcacttgacattttgcaaagtactttgatctgtggactttagcctcaaacataccatttactttgattgtgagtatttactatgttcagtaaaaaggactttttttttccttaatgctttgatagcaattccttcagataatttactggcttgggttctcctgccgttatgctttagactttatttctaaaggaacctttaatttaaaaagttttttttttttctggcaaagctcttttaccgtgctgacttcctaacatagctgttctgagccttcctgatgctgtgacccttgaacacagtagccccaagttgtggtgacctcacccccatcagaaaattattttctccactactttataactgtaattttgctactgttatgaatcataatgaaaacgtctgatatttccaatagtcttagctgacctctgtgaaagagtggtgtcccccaccacccgctgacatacacacaaagggatcacaacccacaggttgagagctactgatctcacaactcaagatgtctaaaagcaagtaggaaagacagttcacagacccagtcccgtcaacccccacttaagtgccctgcttccccaaattaccacctgacttgaggcttaattgttgcttttttatgagtactgaaacccttagtatttcaagatgctttctaccaaaagaggtttggttaaaatgaacaaacaaaacaaacacaaacaaacaaacaaacacccccaagtatttaaatgccatagtgatcttttgagtaacatacccaataagacaaaagaaaaagacacaagaaaaccaaaagttaaattaaaaaaaaaaaaatcttaagaggccagaagttttagtgaaacttttttttttttgatgaatgggataaggaatgtaagagaaaaacaaaataagaagtggttcctaaaacagacaaatgttaacgtgttttctaatcattaatcagcctcgttattatcttcacgttcaaaacctcatacataatgaatgtgtttgcttccttctcaattctactccaagaactgaatatcgttcctcttctgctggaggctaggagcctgagccagtcaggcaggctgtgaggtctccggctgtggctcctcggagctgacagtctgttccgtgaaccttgtaaaggaaggaagccagtggccaccagacaggacttgaaggaggcagagggagggggaacatttcgggactgttcctccccaagtaggagcgcatggagttctcccttcgagaatgcggattattgtagggaaagctggggacaggtcagcagcattgccgtgttccttcacctcttggaatctacatcattaatttctgggaacagtcaaacttcgagtccccctgttcagggcttcatggcttccaaggatctctgagggatcagggattgcccctgttagcactgggaaggtttggtgagcatgccaggtgcatgttcgtgcctagagctgctattagtatagaggcaaaatcaaagacaccggaaggcgtaagtttgcaagacagcaaactgcaatcccatcccgacgagccatcggatgtcttgtttcgccctcctccttcatgcccctgtgttttaactttcctttgaaacattggactatttgaacgtgaaactcaaggaggaacctagccgaggccgccgagtttcacataggctccacatgaatgaagcattctacccagcttcgctcaaaacctggcccatgtttgccaaaagttctgtgcgtgtcagcaagcctggattggaaacctaatcccaaaccaggtgacttctggactttagaggctttgttgtataagtacagaagctgtcaaacaagggcatttcttatttccgcagcctctactgtaatttcatgtgtatacacatttctttctatttattccatgatgttttgagaacaagtggaagtctaatatggatttctgtagatgcagtatttaagcattggcaaacagtagcctgcattttaaattccagcaaggtctgaacagagtggcatgaacatgctggcataattcagccaaaggaaggaagtcccaagggagctatggaatgtctttctttgcttaaatatacctctgtgcttgtgaagaacaaacagtaacattttgtccaggtctgtcctcttgacagtgtgcctttgttcactctccaaaggtggtgtcaaatatattggtggaaaaataataaacttccccagactcccccctcccgcggttgctcaattgatatactcatagggaccattgtaagcattgaaacgtttgctcctcttccttgtaatgtaaactgagagtgaaggagtagtcggggaagtcagcttctctcagaaaggcttacagacccagagctgctgtgtacgtgaacaatttaatgagacctggtcgttaaagggtgagcatgagtgtgtgtgtgtatgcctgtgtgattgtgggtgtgtgcagggatactggagggaggagagggggtgagtagttttgcaatgctttcttcagaaaatctgtgacctcagaaacaaagctgatcaaggtcaggatctaaaaaccttccttggttgatcaaaatacttttggtgttaattgctctcattcaaagcgtcaaatattaggattccagacatagaataatctccaatgtacataggaccattttggagggtgtgtacttgtagaacttctatgggttgatctcagaaaagccgtcatgatgctgaggccatcgtaagactcaaagccacacggaaaactaaaattcaacttgacgttttcttacttgggcagtgtgtactcaatctaaagacgtttcacagaaattaatcactgagctcagtcaagatttagttagactaaacggaatgatgcttatagtcagatgaaattccagaaaatttccttctagaaacttcacagtttgtcttaagtttgacaacatgcactttcattaaataaagtttgtattttgtagataacttgtacagtggctattgtttgactccacgctatagaaagcattggaggatagctatgacaaaatgtggggttaatatacggaggaagggactggcttaatatctgcttcactgttcttagtgtgagatttgttggcatataaaaattaaatagtcccaaatcatcaaaatgaaaagaaattgctcaaatccaggtcctagagaaaaataacacaaagcaacccagaatcatcctactaaggacagcatcactcaatgcaccctggcctaggagtttagtccttcaggcagttccatcgcccataaggaaaagagcaaagataccacaccccaaataattgccatgctcacaaacctgtgtctctaggtcattaaagggcttttttttacaaatgacttcagttatcatctaagaatgcaaatatctctgaattagaaatcattttgtgcttactttactaccagaaagaaatgagccgtttcattcttatgtatttcttaaggatatatcgcaatagcctaaagttatataaaatacatttttctttaaaaaaaaaatagtgtggttcagatcaggtcaagttcagagtgtccttcctagtaaatcaaagaggattatttgcacagcacagataatgtactcatctacagaaaagtcatcaattttaaccaaataagggtatttgaaataagaaatattgaaacgggaggcagtgcagagagctaaacaaagtcaatgatagatcattcgccaagtatgcatgttaccttgagttgagtttgatcttcagaaatatcacaggaggagaagtgagggagaagagtggaatggggaaggaggaataaaaagccactttattcattacaatacccactccctacagtcatactggagtctacccttctctctaagacatttttttcacactgatgttggagcacagggaaggctgtagggatacaatgggtctgctcatggatgctctcatttctaagctttctcctaaggtatcttggagtaagagctggaaatgaacctctgaatcagtcctatattcaccgggcagtgcaagccaactggtctaccatgtaaagtcacagaaagaaaggatcaaactggaagagaaagtaaaatgtcctcacccatgaacttagcagaagataccctgagtctccaggtcccaccatatcttttgcctttctcccaagatctttcttctcttatgttcacctctgtcttgctaagaaacagatctctctagaaaactcattatttgctaataatgagaaaacaggttcagacagctaactctgggttgccagacccacacatactgcagaattagcccacagcccctaaactagaagaagatgggtgtgtatgcatcacaggagacttatgttttatgcctattgacagattcacattaaagtgtaaatagactgaacaagatttccatttctatttttttcaaccaaaccttttattttagatcaatttgatacttagagaaaacctatgaagacaagacttacgtttcatgcttaatagtaaaacttagatggtatcccactataattaagctcattgataatgacattataactaaaccccatgttctctcctcctttcttcctactaaccttcttctgtcctgggatcctttccagactatcatattacatttaatcattcctcctttggctcctcttagttatggaagtttattttcttgtgtttgagggctacagctgtttggggaatacttgtcagatattttatagactgctttattgaaatttcccatatatttttcttatagctaactggggctcactggcttgggagggggaaatgttaaatcaagtgctggtctcataagatcatattaatgcatgctatcaacagagcatatggtggctgacactgtctttgaacttctggctgaggcagcgcgcaacaggttttattcctataagggtaccttctatccaccttttatattttacttttagctttttttttcccaacatcgttaagataaaatataggatagaaaaaaaaacatctgggaggaaaagttcttcatggctcacagttccagtggatacatgatgtaaggtggacagggcataggagctccacagtggggacatttgctcattgctgttcccatggtgaccagaccaggaagcagtgagccaaaactgaagcagagggataaaacagtcaaaggctcacttttagtggcctatgtcactgtccaggctccatatcccaaaggttgatttctcttttacagtgaatatttataactctacttcatttactgtcatcatgaacatatgggcatttgttttatactatgagtcatgtgatgcttaatatcgagatctaaatattagtaggtgagatttaataaaaatcactaaccagacaagcttcaggccacgtttgtgaaggactgtctagattaggttaaatgaactgtaaaaacctggctctaagtgtggtcagcactgtgccatgggcttcgatcacagactgcatgaaaagaagagaccaagctaagccctggaattcatcactttctgcttcctgactattgatgcaccatgatctgccacctcctcctcctgttgccacccccacccctccatgctagactctgtcacctctggcttctgagtggcttttgtcgggtgttctgtctcaggactgagataaatagctcacacagttcactgttaatccaaggttatctgatgtttccttctctctcatccttccagtgtgggccttgggtggctctgttgattgatgccaatgtctctttgacacactcctctcattttaaggattttttttctggctctccaaagatgttctctattcctttggtgtgttttctgacccccaaaccagctatttcctcaaagatctctgattacttttattgaaaaatagtgttagtgagcccagagcactcatttttacttttgagtgaaatatttacaaattataaccagttttaacttttatattacataacaaaggaatataaaggtaaaaacgaaaggatttcataaacagcacaaatatacctaataagaaccaaagattatgattaggccagctgaaacaatctgtcactatagcaaagagataagcattaataactcactgctgtttatattaaaattttttactcttgtgaaaagacaatttggtattcagaacagagcaataccactacacccatgtctgtcctattcttaagttcatttgcacctgaactttaataacagcgtctgaattagacttaatagggaagaggacatgcatgtaaaaaccaatatttgaaggcccacagcgatgctcagtaagaaagtgagaggaaccaagttcagacccccagtacccacatgagtgctaggtgagcaaggcagcctgcctgtatacccagtgatctggaggcagagaaagggtacctagaatgagttggctagctagattagatgaatcaccaatctccaattcagagatcttttctcaacatgcaggaagatacttgaaaacttcacacacagagacacatgctcacatgcaaagatttatgtaaccacacctgaacacacgtacacaccctcacagcacatatgcatgtatgtgagggtgggggctgtgtgtagcagacatgtttaaagcaccacactaaggttgttttaactcattgaaaatgtcactccaaataaaacttgcgattggtttaatttctcttgacaggcgttcagctcagcggtattttattcattcaaatttgtaaacccgagacatttgctggcttagaatttagtcgtaaatgatactcccggtgatctggttttatttgaattgaccttttagatgttcaatttttaaaaaaacacccaggaatgttgggaaagttatatgagggtatatattataaggcctcaatgaacagagaatcaaatagtttccaaatacagacttttcacttttttaattttagttttatgtgttacagtgagtgtgattgtgtggtagagcattcacacacacacacacacacacacacacacaggctcatgcacacacacacacacacacacacagatggacccaggcatggcactcttctactttattgaggcagagtctctcttgtatctgcagctctgtttaccccaaacaggcctgctcatgaataactaggctagttttctgttcctcccatcttcccttaggcatgctagaattgtaagtattagccattcatctagctttctgtgggttccagggcttgaccattgaattcgagttaaccctcagagccaagacaccagtcctccaaatatagttttatctatagatcaaaaatattctctagttcatatttgtaagtattcttgtgtgtgtgtatgcacacatgcatgagtgtgtttgtgattgaacagacagctcccagcataccaacatatcctctaccacggagatatgtctgtttgatatcctgcttttgctaaaaatggttaaataccatgggtgagtatgaaaagctatctaaaaacaaatactgttttgtagaggtgcatttagactagaaaccagctcactgtgtgccatcagggctgacaattcagaggcatgacacagtatctgcattgcactcaagaatatttttgattgagcctgaactttgagctcaaggtagtaaagaattggagatggctctattgcctgctcaaggaagacccttgaaacacacctacttcagtgagaagcagatagcattcaaagtatcacccccttcgttgtatagtctgaggaagaatactaattgtgtttctgacataaaattaaattgtcgacattttacttttatacattatgattattttcattcaaggcaaaataagtcctaaatttcacaggaaaaaaaaaagtccctttgaaataaaggaaagtacgtggcttacaaggaactaataaaacaatgaaacagagttgagtgagcagtattttgggaaaagatcaatggaagtcacttctaacagctcggagctctttatttacttcgtgtttccacatgtgtgctcacatgtgcacatgtgtatgtgtggctgcttatgtgtggagaccagagatcaaccacagataggattcctcgggagcccttcacattatttttgagatgaagcctctccctgggacctgggcctccagatttggctaagactagctggtaagcaagatctaagcatcttcttgtcccagcttccctccgagccaggctttttacacaggttctgggatccagctcaagtcctcaagcccgtgcaatgagctctttacagatggagtaatctccccagatcttaaatttaatttttatttcatgatagctagttatgtacacaatgttactgttatcctggttttgagcaacatcatgaatgtatttcatgtcacgggctttgtttaaaattggcaccctctctctttgtcatgtgtggcaagctccatcactggatggatggtcacagcttataaaatcttgagcctaaaacaaagtgataattatttggctgaggcgagaacacttgactgttgtaagatatttttcctcttgatagaatttcatctgtttctgttacaggaattcaaaagaaggcgaccagtcatttccatctacataatacacaatatgcatccaaaaatgtcttttttctaatcaatattcagagcaaatcaggacatatgtatcataggacacattttacagcagaccttttcatactgttaatgaatattaaaatcaaatacatttagcattcaactgtacttacccacttaagaatggctttatagatcaagaatgaactattttattcataaaatgctgttctatgtgaccacagatgatcactttaatgtcttaacatttcatattcattgaatgaaataatatcagaacatttttataacaccagtttttttttctcttttttttgtgcctttactatttgatggaaatcatacagttttcaatttaaaactttacattctgactatagaaacgtctcagtacacgtggaaaaattaataaaatctgatggagccttttaagattaaaaactataaaacagggaagaattaatttaatttggaagtgttatctattagaaacccacatcaacatagtataaagaaatatatgtatagtcaagtaacaagtttacaaaagggatgcctttggggagagaacaagattatgattagagaagtgtatattgaattttaattaaattaataggatcttgtatcttagtatcaatatagatataagcatatagacattctttgttttcttactttttaatttatttagtatttgaataaaatatgaaaaaaatcttctcattttatatttcttaagtttcagatgtatcttaaatgtagaacaaatacaaaggacatttctctgatgagagaacatatcagtttattttcacttgcagcatcccaagaaacttaacaaagacgaaatgacacccagatggcgcagcccttatcttgtatctttcaaattttgccttgggtgcaaaacatctataaatgataaatttcaggttaaaataggctagtgtagtgcaagcagatagctttaaaaacctgcattcaagatcaattatgtggcttgttatttctttttttagatagtattgttataaatgtattatttattctttagctatgaaataattatctactatacttcatgagactttgcaataaagactgaatctggcaatgaacgagtatgtattgtctaagctctttaacactgcttttgtggtaatgaaataaaaaggacagattcttgttttgagataactcatactataaaggtctaaaagtgaccaggacacacaaacaatcctaattattttttatatatcagctgtcataaatctattgtaaacaatggtatagctctatatgtacagacataccatgtacattatacaaaatgtgtttaacaaagacttcactttgcaatttaacatatttcttatcatttaatttattcaccaaagtgtatataaacacagctgctgattaccacttatactcaacacttctttatagcacagggggacagtgataactttccataattatttgtcaagaacaaatgcttatgtttgaagtcctttgtacatgaagccatcctgtttgagcaggaccatttgttgagatgctgtgttcttttccagtatatatttcttgctccattataaaagcaatatatcaggtatacattgatgtgtgaatttatgtatgcattttcaattagattccactgattgatatgtgtgttcttgtgccaataccatactgatttttattactgtggctctgtagtacagcttgaaatttggggatagtgatacctctaaaagttcttttattaatcaggattgtttgaactatcctgagattgtgtgtaaacgtgtgcatgcacatgtgcatgtgtgtttccacgtgaagctgactactgtctcttcatgatctgagaattgtgttggaattttgatggggattacatttcgtttctttattaaatgacctgaaggttagttggttggttggttggttggttggttggttggttggttggttggttggttttatcatacaagccttttacttgcttggttagagttaccctaacatatttcatattgtttaaggctatcaaggatattgtgaaggatattgttctcctggtttctttttgcaataggaggtgtatagtattggtacatactagattttgcaagttagatttgtgactttcctggaagtgtttatcagctgtaagagttcaccactggaatttttaaggtctctctctctctctctctctctctctctctctctgtctctctgtctctctgtctctctctgtctgtctgtctctctctctctctctctctctctctctctctctctctctctcacacacacacacacacacacaatctgcacataagcatgctttgcttttaagaaataaaaagaaggtgtgagtgatttttgcatctgccattgttcaagagcctctaattcaaaattagatgccagaggggcttatttagagttggctatgtttttaattccctcataggcaatattcgtgaagtttattaaaagtatttaaaaataaacaagcacacgaaacatcatacagctccaaataaaagtgaagagtaaccccgaatctcctcctgctgctgacattaatactgaggaacaaagcattacataataagaaataatattctgggaatgatggaagacatagattgctggcattagaccctaaggagcaccagctctttattggcatctcttctctcctgctctctgtgtcactagagctcttgattttccttcagggtctgatcacaggatctgcatcccactctcaggtaggcctctctttgcctaaccatacagttactcccttgggctctctcttttgcctatagccctattaccgcccctgagtctaacagcatccatgctctccggttttatacccctctccgtggtctgtcccgtaggactcagattcacagttccaagtagttcttgtactaatgcttcctgagtccctcaaacgcagcacgtttagaatgtgctgtcttctacctccctggtctttgtcacctagggatgtatcattttaatgagatcatccagttacacaggattggaatcgtagacaagtatgaaaaagatttcttcactcctccttagtcactcaccattcgttgattcttcaatattgcccttaacctagttacaaggctcttgcaactcacttggctaggatttcttactagtatcctgactactctttgcatcttctctcacctcctaccagcctaaacttttgcaattacttgccagtatcttctcaaaggagatgagttttgcatatacagtaccatctatcaaattctcctggctttagccactcctccaaaagtgaccccatcaagccatgaaggtaaatttagtgcatcaagtttaggcataaatagccccatgtttcctaagggaaaagacacagctggcaacatttcccagctctgtcatgaggaaagggtgtggtccagagtgatttgcttggagcacagatccaatgccatctctgccacttgctttagagaaccccttcccccagactctcctaccacggtactaacaatcttcctgaattgtttgctttgttggtaattactgagtgctagtgtggtgaccatagcataaatgctaaatggtaacacctttgtttgataaaattgatctattgaaagcataagatccatatgattcatatatattaataaatatagaatattttaaaaaaccaaattgtcaaagcacacaaatatttttgtaactctaatgatttttttgcaatatttttgctcattgattgcttaaagtgccaaaagcagttatgtgttgacacctcatgacactacttagttttactaataagcttttagttttctgctcctgatactgatgcccccactcctgtaactgacaagtgacctgacttattttaacaagattaagtgttttcaactaaaactacctacatacagcaagagagggatgtgtttttctgcattgaccttttaccttggtcctttcgggaactccagtgtggcagacagctgaaaccttccatgctattgcttctccagcatttgatactgttctagcagatgtttgctgaaggtcccactgtctacacagacccactctacagacagaggttgcctcttaggcactctgttaatttttttgagtattctttcctcaaggtttgccaaaccgtggagagtaaattttaaaagtcattttcaattcctgggaaactaaacataatataatctatgatcattgctcttgatatgagagttgagtacaaatagagaattacagtaatgattcctacttacttctgtccaaaataacatttaatctctgaatatttattgctttaaatatcttgtagagtaaccatctaaaacaaaatcagatcttattgaatgagtccattttctacatatttttacattacaatgagaaaaaaaaaccctatcagcctccaggaaactcatttacttcagagatttaagtcttctcttctttactcattcattatgagggatttttaggtgaactgttgatccagtgttctccctacccactgccattaaatgtgcacactgtgtagtcagtcatccagaatagcccgttggacaataccgttttcctccatcacacacacaaacctcattttgttactgtatgtgccaaataaaacaccttccccccttacatatgaaaatgggttataggagcctgactgcaaatggaatcctcagaattagagaaaaaagagagcagatatgtgaatgccactgtcattgtataaagcagaaatagctttgtttcatcctacgtcaagtctttaagaaagaagctctgatttgccctcaggcttttgacgtctcatgtatatgctttccttctaaacttagaagtactgacgtccttgtcatttgtgacagggcacagtcactccctcctacacatccaaatttgagaattgtccaagtccgagcactgcttgaggacttggaacacatcaaggagctacaccaatagaaaggcttcattcctgaagtttttgagtgcctaggaatactattgagccataggtgagaaggaacaggaacactggctctagaagtgaaaacacagagagtagaatttggccctctgttatatgctttttgttgaaaaaaaaaagccaagcaaacaacagcaaagaaacaagaaattggaaacgctctggtctatcttcttcctatgaatagatagttcatctcatttctgagggtaattatgaactaactatcatgaccaacttgctattataataaaaatcagatgttcaaggaaattcgagccatctaagtatctgaggtcataagagaacccactgaggtcaaagggggaagaaatgacctagaatgaccttgaaacacattagtgagttggatcttctttaaaaagcatcttctcaggattcccctgaaatccaacaacagtgggagaaatagaatcaggccccaatgggacctcagtaggttataaatctatacactaaatacagatttgcaggcccatccctcaaaactatgcagcgttccagagagactcaccaggatatggtgcttaaagtttggagtaacttaaagaagcatacattttagttgtgtggactgatgggtctgtctgtttagacaacaagctacttaaagtcaggaccctcaatcagaagaacaaaacttcataaagtatcctgttcaagactttgaaaaggttgcatgatcaaaagcccatatggtgtaaatagcttctaactataggaaggaaaaagccttagtgtggctaaatctcatctttccatttcacaagctccgccttctaatctgagtaatggctctagcagcacggacaagataattgcatgttggagaggcacttacttgagcaccctcccttctaagaagctgtgaatgaagagacccagggattccttgtccattctaccagccagtgacccagataatctgcccactattaaaatactcagatgtcttcatttgtttcctaccaagctgcttgattttttttttttgatagtttgtttaaaacatttgtgaaagtctggagccttttttattttattttatttatttttactcttggttttgcatcttaactgatataaacttatttcagatctgctgcctggcactcctagttagattccttccatcagtgttgttaggtgtgcaatcaagataaaatcagggcataggaagatggatccgtgtataaggtccttgctgggcaagcatgagattctaagttcaaatcctcagacctgctctcaaagccgagtatgataaagcaggacaggaggagcctggggacctcccggccatcctttctatccacagtgataagctctaggttctgcgagagaccctgcctcacaaactaaagtgggcagcgatagaggaagatagccagagtcaacctctgactttacatgtgtgcgtgcacatgcgcacacacgggagcacaaaggagtacatttcatatacacacatatattacacatgtatgtcacacacacaaataaatacatacatacatacatacccagatagatagatagatagatagatagatagatagatagatagatagatgatagacagacagacagatagatagatagatagataataaaataagtgagatcagaaattatccttactgagatatgagtagtgacatgtttccttcaaaaggagaagtccaaagaaaaaacaaatcagcaaaaaaccagatccctctagttctaataccaaacaataaaaacattgaaatgagaactttggcccctacaatgtgggtcaatgtgtaattgaggccctggttgataatcacatttgggcttttcaaacctgttactatttgtgagctcaatgccattttcattgtgccatctctgtccaatatctgctgcaacatatgcccagcattatcaaggacctgggatttttaccatattttaagtactattctttgcggctagacaggtgtcttttgtagctaaatcttcacattggtccatgccctgggattctgctgttttcttgtgacttttccctccagagagtttaaatcagtggttctcaactggggggtcacataacagatattattcatattatgattcataacagtagcaagattatagttacatagtagcaacaaaataattttatggttgggggtcaccacaacatgatgaactgtattaaagggtcaaagcattaggaaggttgagaaccactagctagtctcaaaaataaatatgacagtagaatccatgacttcagtccaggtcccagtgactcttccccatgtatagatgtggcacgggtgacaacaatcaaatctcacccataactgtgaggggaagcaagaattgccagtcaccaagtgggacaaagacctagacgagcacgaagagaacctaggcaggacgtctggctggctggctttgtggatacctaagcgtacacagggtggtcatcttgacacacagccgagccagaatcagcattctctaaggaagagaactgatcattgcttctatggctgtcaagtatacagacaaatgacttttttttttctccttgtgatttaattgccagacgtgatgctatgcatttaaatgaaccccctttcccctcctcctgggcacacagccaagttacatccaccactatggctgatacccagccagtgaaaatggtccattcccctatcaatctgcctcccaatgcccttgttgctacctcttcccatctgcccttaggttcagctaggatggtagtctctgagcacctatagaatgctggagcaatgtgtgaaagaagccttatttctaaatgattaccaaggacagaggcctctaacctccacctgacctgcattggatattttcttttttctggtgttcagccatgaggatatggaaattgtgagtgtaagaagttggataacattacacatttggtaaaactgtagatttacaagattataataatataaattgtgaatgtgttataaaggattttgtgattatacattaagttatatttttcttagaaaaaaaattttaaaggctaatgaataacattgaaccagaactcattctatagtgctacgattttgagaaaatccaggggaaaatcaaagggtggaacgtttgtcttctgtttggaatcattttagttacacacgcacacttccttttgctgaggctctcgccctctgaggaagacagaattttagagaaactgaaggaagtgtgttgcatgtaacttgtgtttagttcttagagaattctcgtaaacaatcctgaaaaatagccacgaattgtgtttggtcaaatttctaatcagtgtccctgttagaatttgtaaaattatgttttgaacaaagtacattttaaccttgaacttcccaaggaaagaagataaagtaagcagagaaaatgaaaataggttacactgatgctctttggaattttcctgtggttttaaaccacagctagctctgaagggagttccagataacttttcatcattgtgaacttgactctgaggaacagtgtgagcgctcatgttgaaatgacttcaattcaaaacccgatctccccagaacctttctttttcatatttatgggtcagtgtcctaaaaaacaacaacaacaacaaaaaaaaaaaccacagtaaatacagaattataatttatccattaggtctaattaggatcagatattcattatgcaccagtaattgcactaagtatccttcgtatgatgggattgtttgtgactaatgtactgtagcaacccatgaaatactcacggttatgttaagtgactccaggaaagcccctccccccccaggaatgtctttcatctcagtggctcctttatgcattggggtgaagttcccactatggtcctaaatgtggcgtactgaagccaacttaaatatcgagtattatgactgcaagacaaacgatggtttcttgtcagatacgcatcccttaggtacctcaaaaaggataggagaaattcctcgagccacacattttgtcacgactaagtgggccagcattcattaaagtttgaaaaggcaaatataaaatggaaccccagccagacttaattaaattatttcctttaatcgtattttaaggtcattcgttactcacagcagctaggtactttctgaaaaggattgtgccagccagcataccattgccttccactggcaggcttctgatggctgtcccctccaatttactaagaatgatgagactgactatgttctttgaaagcctactgtgccacatagacagataaaaagatttctgactacaataatattgttacttaattgcatttttaataagggcatgtgtgagtatatgccaactagacactcccattttgcaactatataacataatttatctttaagatctttctctgttaccacggtgatcctttggaccaagtttctcatctttggcattattagcattttgattaaatgactatttgttagagtggattctctggcatgctgttggctatttaatagcatcctgtcttttatgagatgccagttagcacctctccatagcccagtaattgcaattaaaactgtctccagatgtcacttgctctctggaaagcaaagtcacagtggctatcctcaataacttagatgataaatattcataaacttcaccctaatgcaaaactgctttcgcgttagagtgggtgttaataccagtaaacctgtctttgatgttgcttggtgttgttttgtttctgtgcttggcaaagtgtgatggttagaatggtcaactctacaggatctgggatcacctcagacaagcttccaggtacaactatgagagacacttaacgttagattagcctctgtttgtgcccatgagatatcatctgaattgaattagagttggaagaatcaccctgaagaaggtggtgccattccttaggcttgggttcgaaggagaagatgagcagagcattgactgtttctgcttcctgatcctggatgcagtgtgaccagctgcctcaggcttcctgacaccaccactggcagaggccattataactgtatcagatgatgagccagaaagaaagaaagaaagaaagaaagagagagagagagagagagagagagagagagagagagagagagagaggaaggaaggaaggaaggaaggaaggaaggaaggaaggaaggagagagagagagagagagagagagagagagagagagagagagagaaatctttctctacgaacttctcttaacttgcttttgtcacagtgacaggaaaagccgctacaacatggcacccagcatctttctttgataccttttctttctgtatttctctcctcataaacaatcctatctccttgtatctgtctgtacatgttcgtgtacatattctatctctgttgttcacatgtctctactttattcagagtggtttagattctaggaccagttaggcagctgcctgctgcccaccttctccctctatcatcagagccacacctcagtcagcagttttaaatttatgtatgagcaacaacatacactgttgtcacttaataatgacactttacgtttgtctttttcctcttatggacgagagatagtttcacagcagataaagaaaatcaaatcttgtctgaatcagcatgcctcctgagggcctaacaagaattcttaatatcagttgggaggacagtccaggtaccaaaaccagaccacctcaacataatgtgtctctgcagtgtgttaatgggaccagagggtagtagtctacataccagtataagcagttacttatcaagattaactgttttcccagtgggttcagttccttaccagctcagtgtttatagacaaaaattgaaggcatagcactcagcaggtgagcaacaatcccttaagattaatttttattcttttttgtttttaaggacctgaatagaaatatggctagtaagccagcattgttttcctctctccctttgcatggaggtcatggtcttcatccctggttacgctggtttgtctaaaagagcaactaaaacttgtccattcatctgtaatctactctgcagccttctgctctcaactctcagaatcaccagacacacaccctcatacacgaatgtaggcactgaactaatttatctacagattttttctttccttccataaaacgctattggcatcaaagcctttatactgcaagattccactgtttaatgtgctgatctctgacattgtgagccaaactgggcaggagttaggggtctgtgtagtttattaattggttctcagtcctatcacgatttcagatgatgaaaagcttgcttgcttgcttgcttgcttccttccttgtttctctctctctctctctctctctctctctctctctctctctctctctctctctctctctctctccttccttccttccttccttccttccttcttttcttccttccttcctgtcttcatacctattctcttttcttaatataaaatggcaacctctcatcttctccctgaaggctgactctcatgggatatcaggaaggcaggaaggccaaagcaataaaatcttccctgccaacctctattgttgccagaggcaacttggagcaggcctgatcctagggctgctcttaacaacagtatcagagcttcctcaggctgttgagctgtggcattccagaccccagctgtcttttgtttgtttgtttgtttgtttgtttgtttgttttttgagacagggtttctctgtatagccctggctatcctggaactcacattgtagaccaggctggacttgaactcagaaatctgcctgcctctgcctcaaaagtgctgggattaaaggcatgcaccaccacgatggttctctttttcagttactctggtctagcttttatatctgggaataatcttctgaagataccaccttcagagggtagccagcctcagtgattcctactggtggttatggaattccataggtttcccccagggatcttgctcagagtcccttaaagatgcatttgaaaataaagctatacctataacccaggaagtcagactctatacacccaacccttgctgtcatcatatcactacagaatagcaccccctgggtcctcctatttttccccacagggttttactcttagaaatactgtagctatggagtcttattctcactgagtacatgatgttacatctctgagttggggtcccagggagcccaaggaaatctcatagctatcaaaggcaactccacttctgcatctttgcttcactagtgcagctattattgttcaccatggattaccaaaactgatggatactttgagtagcaaaatttcattttgaaataattaaccaatttagtttattacgattaatatctcattagtaatgaaatcacagatacaaactccacactaaacctcctcttgccacaagtattaggctccttagggttgtctctggggtctgcctggaaattctgctcagctgtggaagttactttccttttaatatacaggcatatttgagtgatccgtaggattttagaatcctactacccagaagaccatattacatattctataatagatgtaaatatggaaatgtaagactaatagaaagtaaactctgaaaatattttcaataatatactgcataagccaaagtcagcatgattaaagtgttttcctggagaatataggagggaccaggaatacagctagtttttcccagaaattccactctgcacacactgaagccctgcgtggcatttcccttcattaaaacttggcaccagctaacgaggccaaggtcatgtgtctcagcaatctatgatttcatgctgatgtctgagttcaagtgagaacagtccttcctacctcaaagcaagccactcaaaacttacaaagtgtgcctcaaggaaacagttgttgctagctcttgtcacagcttagacagagccaggatcttccagacagagcaagtggtaccaaaggtcaaagcgacaccatagagggtctatgtcctctattgtgggtgtggtcaattctagccaaacactaatgatcatagtgccaccagcttcctctgagagatgacagaagtgttctttattctagggcagtgtttctcaaactgtgagtagagacctcttggtggggggcaggggggcaaaatgatcctttctttcacaggggtcacctcagaccatccaaaaaaacacagatatttatattgcaattcacagaagcagaaaattacagttataaagtagcaacaaacatgaggaactgtattacagggtttagcgttgggaaggttgagaaccactgttctaggatcagagtccaattaacttgacactatcatccatggactagggtcttccagtccattccaatcaaatcacaacctcttccattgaacttccattcacacactggtatctaaattcaactttctaaccctacaatatagttgcctcttatacttagaacttaagtaatagaagattttattttgcttaaacaataggagtttatttctcaaccttctggaagccaataagaagttaaagaggttgttcaaaaccaaagctctgcagaccctcttttccctgcagcatctctccttgtgtatgtcccctagacagatgctttctcacccactgtatgaggtcagtctatctatgtccttacatctgtggtgtctattctgcatgtccatatttccattcctttcctcatatggattctaggtaaattggatgaagacccaccttgatgcctcatttaaactggactatcttttaagaggccaaactccaaatatagtcacattctgagatatttaggagtcaaggcttcaacatagaaagtgtgtgtgtgtgtgtgtgtgtgtgtgtgtgtgtgtgctcacacatgcatgtgtgtatatatatatatatatacatatacatacatacacatacatgcgtttctgtgtgaacatgtaaagaacttggagttcactgatttgggtagactggctggataacatgccttagggatccacctgtctcaatctcttaccagtactaggattataggtatatcgacctcacctagtttagttttggttttatttgttagttggttgggttttttgtttttgtttttgttttgtttttgttttgttttgttttgtttttataggttgtgggagattaaactaagggccatatttgtatatggaaagcacttcaccttttgagctatctccccggccctcatcacaggaattttgagaagagacaatttagtcctcaatgaagttaccactaatacaagttgttgactgaagaggggaagtgatgtaatctcagaaaggctaaaccacctcatcctgggatctcagccttcacattcctgaccatacgtgagtcccaggacagtcatctgtgctttcagagcttgtcccagccactagcttcaggctccattcccagtgatgcactctaatcagatcaaagagactatgaagggccagagaaatctatcacactgtgtaaaacagccccgagaacgtgtttcataatagtgctggagcgctctcagacataagctaatgtatttgaattatctcactaggcattcatctctctataactcttcaagctgcttaagtgtagagaaaacatggcctgccataaatttcacagaaattcagccccgatgaaaagccgcttgttccacagagaacgtgtctgtcagcttgttatttcttccctgatttccctcgggcttcctttgccatatttacagtggagatagatgtagttaaggttttgctgatctgtggaaagatcagaagaagagcaggaagatgtatttctgagagtcagatctccccccaactttgtaggaaggctgaactgaggcagtaatgaccagaagacagtaaccatggagaccagtagggcaggcttccatccaggtgttcctcgtggatcctgagctgaaatctttatattagcctaaccccccccccaaaaaaaagaatgctatttgttactactgtttagtttttaatctctggtaataatatctaactatattctggtaataattctaactatatgtattgagggaaatgttcaacaagacagggccattaactattacatggcgactcactaagcagatttggaatctcttgccacgatcaggtcaggatgtactacttaggacaaaggtgccgtgtggagagtgcttaccaaggttctcactcgtccttcatgaatttaatttaattcacaattgacttcaggggttagtttagaagatagttaactctactatggagctgaactgcctaaaactgtttgataaccaaaatgtagggccagttatgaaccctctttgccttagggatgtttgtggtcagacttggattcttatctgtccatgtttaggatggtactgacaacacctacttagccatctatggaatggctggctccttcatccttcatgtttggttcccacttcaactactcgtaaatggtagtgaggaaatataccctgtatgcccacccattaatataactagaacctgatactctctgattcatctgggcaacacgtatctatccatgtctattccctttccttattgatggatggctatcaaaagtcctttggtggctctcccaacatctaagctgtctctcctctctgagttcttattcccaaatacaaataaccagagcatgctgccagtggttaagaagaaaaccttacttcacagtgtagagaagtcttaatgttaggaattgattttagcagcctttagcatataatggccattgaccatagcatcaagcttgttgtgttgttgttgtggtttttcctataacaggtccatgctgccagtgggtagaatgttactgaatttgtaacatgtgttcatcctgggattctaacagttaaaaatcatttcagtatagtaggcttactgccacgatcacttgtttgcagaggtttcaaggtgacaagacttccttgattggtttgagctaaagagaatgatgactttagcaatgacaatttatcaagtctctcctatctcaatccaaaaccacaggttttgtttagtaacacagaataggcaatagcaaatggtttatttcaatcccaataatgaactgtggactgatactctaccaatgtaataaaacaaagctagatttaaaaactaccagtcactttaaggaatctgggaagggctacattggacttacagcaattttaagttccatatgaatgcaatatcttatatccctcatgtggtcacagtataacagtataattatataattaaaacagtgtttgatttcatgaagttttaaaaagtaaaagaaatagcataacaacattaaggggaaaagggggaaatctacattgcaaagcttgagttctccaactgtacatggacacccaaaccttgtccagcataaaatcttcaagggtcagccatagaaaataacatatagattcatttgttttggaagctacaaacagagttataagatactgtgattatacataatggaggaaataaatcattgcatacaatttttatatgtatggtttcatactcaacaccaaaaggggatgttcattgtgggatagacaaatgcaataccccactgtgttgtaacatgtaagggattatctggtttggtcatacttgttatctattgggaagttagttgggaaatccttgaaaaacccaagtcaaaccaaagcttgatccccagttgagctattactaaggaaatggttttgcaatgggtagagaggtggctgaaaaagatcctacagtctctagtgtgcagtgaggtcaaattcattaccaatgacaaatttcctctaagctgcaagttgcaagactagcctacataactaggatgtcatgaaacactgagaaaagacaacataacccgaagatgacagtgtacccaataaagaggagcacggagaacctccatcctgccatctttctgatctgaagttcagatctaggttactttggtagatgagtgtaaacaagatgtctctttgggaaactgagctcttagagccagggccaaagggctcaatgctcatctgttaaagagatgccagccaatgatgctgagactgtacaggtgtgcagagtcgccagacaggtttaatttctatattctagggcatgcaacaacacatagactagtatggattaaggcttaggagatactcagagtctacttagtatctatcagtcctgcacaaaaaataattcctcttccccagactccgtttatttactctctgttttactatagcagattttatgttttgtgggagtgtgggaatggtgttcacgcccatgcatgcacacttgggagtacagaagtggggtcagcacatataagacctctccatcactctgttgagacagggtgtctcactgaacctggatccaacacactggctagagtggctggccaccaagtgggaaccctcccgtctctgtctcatgtctctgggattacaggcacattcttccccacatgctttttatgtggatgctgggcatttgaacagaagtcttcgtgttttcaggctaaacaatgtcattgcttcaaccccagtctttatttattattttagcctaatccagttaaatcgtgggctaagcgtttatttttatagctgtgctgctaactaaaatgctcttgagaattttccacatttgaggcactatggtatgcaggtttgatggatgatattatatgattccctaaagtaaactgtatgtgtacacagaccttagttttcttgtcctttttgcttggaaattatttaaggattcaatgaatactaaagggatccatggtcaatgattgaatgggaaagcaatgtacaagatctatactatcgttgtgccaagtggccaatgaatagcagagttccaagccaggtcagacacacagtcatgctcatggtgtgttgtttatgttttgtgttggtgttgttgttgttgttgctatcagttggttgcttggttggtcagttggtttttatttcctgcctatcttagaaattgagtagccataaaaatgctagtcaactggcttgaaaaagaagatccttggtgttgtttaaattctatacaaaaactgtttgacccaggacgaggtctcagaggactaggcatcgttgtcttcgccaaatattaacagaaaaacaagccagtggaacaagttaaactggaaataaagtaaagaagctgagaaaccaaggaaggcaagctaagaaaaattggaacaagcctgtgactcaggaaggagaaaaggctgcccaggcacaaggggtctgaaaagcaagatgaaagacaactagatacagaccaggatcaactggagcacagagtaccgtgaaggagatgcacatcttagtaattaccaggaaggccaagctgggtttgctcctgtcaactggccaggatgtgatttgtggcttgtaattaaaacagatactgaaaacagaaccatattctcagtttatttgatgctgtgtccaaagaagaccacaaactaaagaacagaatgaaaggtgagaggaaaggccagtctcaggcgtggcttctgtttaaagtatgagaggcacaaaggaacaaaagagccttaaggttttcctacagaatgctagagatttcaagtgtgtgtgtgtgtgtgtgtgtgtgtgtgtgtgtgtgtgtgtgtgtgtaggactgcatcatgcatgtgcatataaaggctgcaagtcaacactggatgtcttcctcaattgagtctccactttgctttttgaggcaagatccctccctgagcctggaactcaccaattaggttcgattcgctggctggaaagctctagggatcctcctttgtctgtctcccatgcagggattatagatgcttcgcagccatgcctggcttcatacatggatactgagaattggacttcaggtcttcttcattctgcatgccgagcactgtaccaactaaacccacatcctcggcccctaacatggtgttgtcttgatgactttgtcttgtatttctcatacataggatcacgaacattgttatatctatgcatggaacaccacagtgtcagctttgtagctttcacgcagtctctgtgcatcatgggctcgtagcataagccaaaacatcagtatttgcagttggttcttgtccaagctgctgttatacacttagcatcactgcttgccgtagcacagactgagtgaccttccagtctttactgcaccactctctagctttctttatgtcacaggacatcctggtgctgaaaattaccctttggcaaaggcaataaagaaaacccacaaacaccataaagaacccagcttgcccactctgcagtgacatcccatagggtcatgtttctacaccagaggaattctagcaggcatgcatgtgtttaacttcctgccatttatgaaaactgaaccaagcattgccctgtgcccacagtaatgaatgccctgacagcatatgtatagccacctgtcagcatgggacaagccccctctgatgaattgacaggaccacacttcttctttctgcttccttgccacataagacacgcacagaggacttgtgtttcgtctgcagctccgggtttccatcatttattttttatagcaccggcactaaaccagttggaacagatgaaggctgttatttcggactcggtacatcaccgtgctgatttgctgttcctaggaggcacacttagtgagttggatttttatcatttttgtcatgggagacctggctcgtcaggacgtaagtgtaagtgtcttgagctgcttcataatttccataatgtaaatgcttaattatttcctatgcatggcagggggggggaagggctgcgtcagagtaagatgagaggcagatgttaaggttattggtaggacttctggcaggatggcaggggagtggagacagcagaaaaacttgtcacgtcctcttgtttctcaatagatcaccaatttttgagagatgcttggtttgccggaaacagctgtgtggcatttcaaaaacagattgccatgcagtttcagagatgtttgtatttctcatctttatgggctctctaaatacaatagaccagcagttttaggcttaaaaggggagggtagtaagaactttcaagagagaatattttaaaggaatcatgtgtaatgaactagaaactttcctcccacccttaaacacacacccctccacacaccaacagaacaacagtaactaaaaattaacctgctaactggtaataacctattgcaacttagaagtctttttgtctgcagtgggcttggtgagggtagttcatcatccaaaaggaaggagtgttaaactttaggagatagaatgcgttaggtttatttccccatgaatatttagcacacttcaaggtataaatattgctgctctttcaagcatctttccactttgccctgtttccaacattcaagactcctgactccttactcagcggtttgactttgcaaatgcaattagcaaactgagctggtaaaacagaaaatacttaagcaactcctatgcttccctgttttctagtgctccctgcttcacctcaaaacagaatcgatagggcaccaggggagaaatggattcaggtcggctctaggcggctttatgcactttctattaaacttgacggctaatttgcaagttcacacttattaaaagctagggttcttgaaactctggcagctgaaccctcccaactatgcacttagaaaatggagctcagagaagaaccttgcatcaggaccctagcccaggtattgctatgctcaaagacagaaattaattctcctttcatgctttctagtaaaaggacacagcgaggcaaagtaggaagaagcattaggtaagaagccagaaattcccattgagagtcttgcatggaattcaaaacttgtcatttcatctgaattcacaaaattgtcctaagcaagaattcctccttaggcccactgatgggatgtttcaaatgccttttctatataaagatgtgtttaatctgatagagcaagtgacatttttataacccagaaaaaattatttattcttggaaaagaaaaaaaaatcctggacatgcggccagatatgggaaaaatatatttagggggtgacattttttggcatgaagtagaaaggaaacagttttgttttgtttttttaatgaagcatttggcaaggcagaatcttagaactatttctaaacttgtccatttgcaaaacctcccagactgttttgctttctctgctatgggagaaggaaaatcccttggctgggatgggctgagtcccatggctcataggaattggttaaatgaactaaactcctgtcatcggctctgcatcaaaatgaaacacatggcatggagagagagaatcaaaaccagctaatgtgccaaaaatatttgaatagcccttgaaggttagcaacacattcatttacataaacacatgcacacacatacatacacataccacacatacatagacacattcatacacatatatacttacactatacacatacacacacatatatacttacatacatgcaaacacacatatatacatatataccacacacatacatacactacacatatatgcatatatgccacacacttacacacaaatatacacaccatatacacacatacatatacaaatacacacacacaacacacaaatacacacacacaacacacaaatataacacacacatacactacttactgctttaaatttcttttttagagagagttggtcaggctcctatgctctgacccatgtgcatctcttcagagagagtgttgctctcatgaggaaccttggcatcccgaacttttggggcttgtggtgctgggaagaaataaaatatgtatgttagtaaaagtatctcagtggcgctaaggacataagacagtgaacctaagaatatcagtatacccagcccacaaatgtggatgatgcattcatccagctcagcacagtctttgctcctaatactgcacctgagcatccctctctgagccaaggacaagcataggtagatgctggggatggagacaacatggagaccacaagaacatgcctcggtttccttccttcagcctgtcattttctttttccagtgcctcttatctcagtgtagaatggagcttaaacccatgttcacggagctcactggggagccaggtaacctgctcaggattagtaaacaaccggacttgtgtctcctcaaggctcaacacagactgtttctgtacaccaagaggagtacaggcaggcttgttgactggacagagggtgctgcactgttaacctgtgttctgttttcctacgagctgagcatgagtctagtggatagaggttgattttttagaaatgttgctctgtcggtggggaaaataaaatgttaactccccgcaaaggtgttagatcttcacccatgtttggccacatacacagggtctctctccttatatcagaatcaacacagctgcaagcttttcgtcttctaggacattgatgttttgtctagagtgttgtcatgtgttatggggtatgagtgtgacagagtccctcttttctccatttctaaattgaatctaaagtcctttcaactgctcctatattaccacagcccttcttaaacagcctaggcagtccagggaaagccaaggtgtgcactcttgacattgactgaggaaagatgtgtgaccctgggctccaggtgggctaccagcctccactgtcatcttctctccatcagtttgggggagaagtcaaaggtcagacttgggtcaatacagttcttttgtcagcggctgttttaagttccaaacctgaaacctgaaggctgtggaaattctaaggccagttgccagctagaacaatcattgggaaatctaccttccttctcactcctcttaagtgagagaagtgttgcttttaaagcagacataattagagaaaatggagaaaacggtgggctagcatcaatgccaggcccttacttgggttatctctctccagtgaccatgcttagaagctagggtgaagtgggtatttccaaaagcagcccacagcaagggtattttaatcacactatacttgaaatgctaagctggagttttagaatgttagcttaacagtgagacagtagaaaaaaccatgctggtgagcatgcttgcattgagtaatgcaacaaatcctgcttgcatggtgaaaacatttctttttaccgtcatatggacttctttttttttaatttctcaagtttgtgctgaagatgagatgttatcgaggtgatatcttctgataccccagtagatttgcagaagataagtagcaaacataaattagttagccttaagtgtagtccagaagggacaggcctcttgctatcaggagggtgtgttagggtggcgttgggctaatgacctctaagaataactgtagaaagtgatagggatggtatcatccatatacctgtagttaactacagagagttagtgagcatttgcctcatttagaaagggtatttcctggattctcaattctgtactgctgtgggtatgaaaatataatgggatcattagcatggtggatggcattgattttaacccttccttaaactcccctgcacagctcttctcttacctccccttgcctagggaacgcacaactacccagacactcacgatcagcttctgtaatgctctcaagactcacataacaggaacgacccatttctcacctgtatggctgccttaggtgcaagcatgccttattgctatttaataaaaaactagacctgtacatcttcaggatcagtcagatttttgagaacatttcaaaatatagagtaattgagtctttgctgactctctagtcaaactctcaagaagcaatgtttacaaaaccacttaagactgtgacagcaggtccctttcatggcagtggcaatggctgcctatctgagtgctgagttcagagctaggctggtgtgcaggagatctgtcccactactgaggcctgagtaacttggcccctggccagggctctacttctaatttgtaaaatggggagacatggcacctagctgagactctgtttccaatttgtaaatgcaggaaaggcaatggtgggccccatcatgtctgctattggaagcataacctgatttaacgtgagcaacttgggaaagagctttatgacagtaagtgctcgctgcacggatgccgtgattgtcttatggtgaactcagcaacactaaaattgtgctaaaatactaaagcctaaacattttccaggattatctattagccattactgttaaatgagttgagtttcatcaaggcgtaggtgcagaattttagatatgtgttagtagacagtttgtgactattctacgttaaagggacacacatgcacacattcacccatggacatacatagggtcaaatgtttcaggggggtagtgtagggattaacaaacatctaacttagaagcaaatgcagtttcagcgggattaatcacccagtgctatttgcaaacagagagtttaaactgaagactggaggggacttagggcagggcagcaactgcatgcctgcctgtgttgtttgccctttctcctcatcagagtggttccctttaggaaagaaatgcttttttctcgattcacagctgtctacaaacagtattctgcccagaagggagaaataatttacagtgaatcatctgaagcaagcatcctaggatgtcaaaatgacggactgctgttaaattaagaatatctgtctacagaatcacacatgacttctcactgtggaatcaagccatcccttaaaacaggctgacattgagagtggaagaccacagagaagtttcccctagctccaatgtatacacatcacttcccaaaaccatagctccctcctttgtcttaaatttctactgcaggagtaaacattatatttttaaaaaccaagccacatccttaaatacttatggtttacctgaaaggagagactgttctgcccctgtcagtacatctcggagagccttatacagttagatgagctactgcactcttatacattgcagagactcaaccagccctaaaagatgattttcggtaagcaaatgtatagtaataaaggaaatgcatttctaatgatagggaacaagaagttaccctttagctcttaggagtggagaggtgtgatagtgcccggtagggtccacagggcaagctctgtgggattgcctctctcttctggctctgtatttctctcctctcctgccctagtctacacatgtctagaagggaagaaaagctcagtctgggatgcaggtgtagagtgtggagtgtatgagctgcatagtccttgctaccacaccccgtggttccattttattaaacgctgagcagtggtcacataaatccttgtgaggaaaaatgtattaaataaggatcaagaagaaaggaaatgaatcaggaaaacatgccagggtctaagacaatcaacactgctcacttcatgatcatctgatgtgatccagagtaaaacagactgagtttactaacttcatatgactatgaatctgtacagactagctgtggtatgcaatggattcacaataacaaatgcgtttgcacaattttctctcaacatttttttttcatcttttggggaagtgaataccaaagctttgtaatgaacaaaagataccctgataaagttaggcttagcttggttatatctcactgctattttggtgactgtgcggttgacaagcagatcccacccacctattcattataacatttctcttctagagccagaataggacagactcatataccattctgatctgggtgcatttcttcagaaggtatgctgctctcatggggaaccttggtggcctgggcttacggtactgggaagaagtttaattagtcaaaagatactgcagtgaagttaaggatataagacaatggagaaaagaatatacacccaccttgatctctccttgacctctactgctataattcccagaagaaggactaccgtgagattttgcacagacaactgtttttaagctgattcagaaaaaaacccctaggggactgcagaggaagggagggaaggacagaatctcaagagaactttctttttgcttagtgattgtgtttgtttacttagggctgctaggggtggaactgagggccttgggcacactacacaactcacgtgtactctgtcaccaactcacatcccaagcacacacgatgaaatctcttgagtgggttgtaaaaacaatgaagagtaacttcattctacccttgtcctaaaagtgttttcattctcatagagatgccagccagaagaaaagtatccccgtcatcaggcattgcccagacccagcttcctgcccactcgggacagtgcaaggttgtcaattacagatggggcaatatttatgaaataacatgcctagttagagatcgacttcaaataatgtgacttgtttcactgaaaggccatttgaatatctagtactaacttccttctgaccttaatccatgtttgtcattatagactgttagaaaatacaatacatattgtaattgcttgattcctccctaccaactttagaggacatgaacggcctgacctgtcttccactcaaatagaacatggagatagtccagtcgtgtgtttgccttggccacccttttccacagtgtggagtggggcatgcatctcaacaacaaaactaaaaccaaagccaaaaccaaaactaaaaaaagaaaagaaaaacataaaaacaaaaatcccccaaaacaaaaacaaaacaaaataaccaaataaacaaaaacaaacaaacaaacaaacaaaaaaccagaatccgcctctcgggcctttttcaacatcaccagttttacattttctccctattgctcagtactgcaaatgttataacccaaagccaagcattctcctctctagccctttttgattttttttaactttaaaacataacttctttagctaaagagcttactcacacagtagctggtctaacaagactccatattaaggaaagactcaaacactttgaacatctagtgagtaattgtgaatatatataaggtaaagaagaaaccgcctgtacagatttaggtgacttctgagatatgcctgatgttagccaggcctaagctgcactggtccccacactcaggtgggattcagacatcaagatcatgtcacaaacttctcccttgttagtgaccgcatcacctttcacctctaagaggactccctcacgaaagaagagtcatgaggtttttaatttaattgaatttggttcataattccaaaaatgttttcttcatatcattaatgatctgatgtactacttttaaattgttggaaatttggagaatatgcatcagtattcactatgtatattgtattatataacattttaatattcagagtttactgagacatatttcagtggtgatgttataaaactctgtgggttattttcaatgttaaaacatctttgttctcgttacttgttcgtgcaaccattccatgatactctctgcttgttaatgacagtgcctgcctacctataacttctcagtaggtagaatacacttttttttttttttttttttttttaccatatagacacttagagttaacactttgaaggcctccaaagagcttctaatacaatttcatggtttttcaatcttggcctccactgggatccagaattgaaaatgggcagagacctcatttctttggggtgtcactaccccatgcttcttgctactaggatcatcttgcttgcttgctagctacatggcttcctctctctcttcttctgaaattgcttatataatacaccactgaataatatttcacaaattcaccttcatatacacacacccagtgttgagttccttaattttcatatccccttgggttaaatcagagttgagtccttgagttgctaattgacaaaagactccgagtctatacttcagccagatattagctttctaaggccattgaaacaaaggacaataatttggtaactctgttatctcccaattcccaagtctagaacactaaaattaaggagttaagagggctaggttgcctctgagactgttttagggaaaattccttctttgcttctactaaggctctagtgacttctagcaattcttggcgtcccatgactgtggtgacaagatcatagtctctgcctctgtgatcacacaagtcttcataactgtctccacatcaacctcaaagtctttcttgccctcattcccccttgataatagtcattgcatttaggtgccctactcagttaactttgtatctataaggatgctacttctaaccaaggccaccttcatggatactgagtgctatgaatgctgatttcagcatactttctgggaagacacaactcatccaaccatagtgactattagacatggagtctcaccaagcagacaacagcttcaaaatatctcctgcaagttcaaagcttctcagtctcaacattcactttcctccacgcccagacagcgaatccactctgtaggagctagggaaaaacgtgggcatctgttccaagttatttgtaagcagaactagaatacaggagaggagtagactaatagtccctcagtatcacccaggcactttggttctcagacaatacttgaactcctaaagaacatacaaacatctccctaagacattttcctaggtgctatgaatctccttgtaattggtccctttgtttttaattatttctgtcatacttcaatgccattcctattcacacactctatctgagataatcctctaacaggatggagtttcctacatcctaacatgttctttgattgccttgactttggagagcaaggaaatgccctggaattttttgctgtcatgaaaacaatttagaaggtcgttgatctccactgaatttttccatctttgctgatggtttattttgtataggaaaaaatttacttcctccattgtaagtcattgtttttacatgtgcatgcttttaaaggaagatcacccatggggcacaggtataagattgtgggatttgtttgccattattataaccaatactagtctgtgtgctagttttcctgaagcaaaaaatatggatgggtggttgagtgggtggatgggcagatgcagagacagacaggtaaatagatgataaattgatggtagacacagaaagagagaaagagagaggggagagagagagagagagagagagagagagagagagagagagagagagagagagagagatgggtagatggatagatagatgggcttacagatattggtaggtgacagactgacagtacttcctagtctttgattattgtaacagtttttagtataatgacaaagagcatctcactgaaaaatgaataccaagaggcttaattaggcatgacactgaaaatgtattttataaatattttgctaagtcgataggataggaagtgattagtgaggtggttgttttgccttatgctgcttttagagcccattgacattcctcatcggcattaaccatctgacatgttttccacttggaggaatagtctgttctgagttccaattcttcctctatttccagtgtgcaggccgagagtctctactggaattaccaggatgacactgtgcactcaagcaaaccctgaacatcattgaaaggaggatttttaaattaaccatttgagttttccaaactctaagcccttctcagtgtgtggtcacttggccacaagaaatccctacaaaacagataggaccgtgagttgcctttgtcataatagaagaatattgaccaatttagtggtctccataggaatgttcagtataaatatatccactgattgtctttacattaccgtatcattgtgtcaggaagaataagattgggtagaattttgagctgggacaggaaggaatctcttcccagatccatgatagttaacatcccgccatcccctccaaaggcacagctccaatgacctaacttcctctcgctggtcccatctccatccttcctgtttactcagagacaagaaggctaggacttgctgcccagctgcacaagcagtgatgtgtgtaagtaaagcccagatctatgcaatcccattatctctaaggtagggtaaagttgagctttttcaattttctagttctgagatacccagtgtatagcaactgctgcaaccaggatcctatgccaacggctggagcagtcacacaagggttctctgacattttagactcagagggactagaatgacattttagtcactttctgaaggttgtcttgttagtgacagaaataactgagttactggtattctctaacaactttctgcatgcaaatgctgctcttattttacaaaatagcaagtgctactgaagcatatgacttaatacgttttctctgacaccctgatggcatcgttgttagtcagattgccatctttatgacaaaatatctgatctaatcaacttacaaggatctgttttagtctgtggccacttgccctgtcaaatgctcagctgcagctgaacatcagggtattgaaacatgcagtggaggaagtctgtttacatcacagagacctagaagcagggtaaaacaagtggggggagctttgtgtcccagtgtcctgtctcaggccaccccatcccaccccacccccgtgacctcacttcctcctacttggctcatctcttcaacctcttcttccatttctcagtagtaccataggatgctgaccaactttttatctgatatgcccttgggaaacatgtaaaggccaaaccatgaagtgtccatttgagtgatatttacaaacagataaaaggaagatgacttatgacttttaagtgacagtggtgggtccgcatcctcacagagaagtctccactgccaattcagggctctatctagtgaatgacaccaaaaaaaaaaagagctcttctttaatataaactgaatgtgaaggaaataagtacttgaaaaattgcagctcaccatctgggtgacaaatgtgtatttggggatactttttcttttgataaaattaatgttgatgttttaaaaattcaaattatattctcaatattagcttgtatattagacttccaacccaatgtttttactatttctccgtagcatgaaagtattctttgataacaaaattccattagctacagaggaaattaaatatataaattgtaacacccctcagggtaaaatactgaaagctagatattttctaatgttaaacattgaaattcttaacattgagtatgttatatttctctgagttccccccaaaaaagaaattatgtaagtcctactgtacatgaaagccctgcgcccgaccatccccaccaccaccaccaacatcaccaccaccacagtagattgtgatcggtctaaaactgaacagaaccatctggagtgtgaatggctcatcagactaaggcaaggcaagtgagaaagtcctaaagccctctcccaggaaactgaagatctgcccactccctgtgctcacagaccagagacaagaactgggctctgagaccctggctcccaaagcggcagaactgtgaccatcatttgtcaggttggagagggctggcctaaaccaactcagggcagacgagagacacccttctctttacttattgaggaaatggaatgtggggaaaaatctcagatggaaataccgtgatagaccacacgaaggagtgctgtgcgtgaggagagcttttcttagggagaaatgaatagaaagtcaaagagaaggctacacctacccaaccctgtatcaccacactggagctcaaactttgggtctggctcatgctaagtgagctcactaccagcaaacaaagtcctcagacttttcccccacctttttttttagttcaagacagggcctccataatttgcccaggctggccttgagctcactcttcagcctgaccagactttgaacttgaaattcttctgccttggtataccaaataactatgattacaaacatataacactcgtcccaggttctctttctttgtcaactctatatacttaaagatttatttattctcttacactctcgcctctctcttgcctcatgccacttgatccccctctttccccatcccctccccaccccctccacatggtcatggccggcctccacttccctactctctccttctctctgcctttctctgcctctactactctcttaactcccctccccatgccctgaataaactctgttctatactataaaataacaagattgatttatttattttatgtatgtgagtgttctatctgcatgtattcctgcatgacggaagaggacatcagatcccatcatagatagttttgagccaccatgtggttgctgggaattgaactcaagacccccagaagagcagccaatgcttttaacttctgagtcatctctccaacgtaacagttttaaagtatatgttccctgaacaaagttttatttgctcaatactgggaagacacactttaccagataagaaaatagaagaaaggaaaataagaaagtttctatagctctctctctctctctctctctctctctctctctctctctctctctctctctctctccacacacactcatgtgtgcacgtgaaggccagagattaagccagagtgccattcccacaaatactgttcacctcctttgagacagtatttgtcgttggcctggagctcaccagttaggttagactgactgaccagtatataaggcacagagctttacctgccgtctccacctccctggcactgggatgatagcatctaccatcactcctggtgttcctacttgctggggacctcacctcagttcttcatgctttcacatcaggtgcttttcagaccaggctattcccagccccttattttaagggtatttgtttggtttgaggcatgtttttgtttgtttgtcttttactagttggttcttcagctcagaatggtctcaaacttaatacaatcttctcccatccttgagtgttaggagtccagctttcagtcatggtgtctacccacactctattatctgtggtaaatgctctacacctgtcatctaaccctcacagcaaccagaagcaagttaagtattctgtcttattggtctgattttacatcggaggtaggaaacgtgggaagcctgactctgtgtcttgggtgacgtcttccccgagaacgcactggtgaggtcactggtcaatgctggcaagggacctggtcatcagaccgacttcatcccaggccagatagacatactgctgggatttgtttctggtctttcttttgccaaagcatcaaagcagtgtgacttaatgaactgcttgattgactgtttaagacaccggggaggtctcgtaagagcctggggaatgccgtcatcttaatttactttttttcctgagcttagagtcaccatgagtgagtttaggattagggaaggctctctggttggaataacttgtgttatactgtgcttcagtttgtaaggatttggtgaataaaggagacatttggtcaaccagatttagccagggcgtggctctttgaccaaacactaatcttcccaacccttgcgtgtccgtggttgaggctgtaaggaatgtttctccgtgcacatacagatccgctcagatttctggtgtcaagcacaatggtgtatgctgacctagcaaaatattctcaagacattcccatccacaaactctttgcccggggaggcaggttgtttattagcttggttttcttttgacaagctaagctcctatctgagtgagaggtaaagacaaaggtagaaaccaagggaaactgaggccagtttccctcaacaaatgtagacccccaaccagtgggaatcacagccatcgtaagcatctataagaccttggatctttgtaaccgaagacagaaccttgatgcccccctcgttctacctgcatagatgaaagacagattttttttttattgaacagcccagtaatctcttcagaagttatttcatctgaatgtactaaaggccaaataattatgttatgcatgtaaattgtaagcataaggccacagcacaaagacaagttaatctctaagtcaatcatattccctagacttagtcattaggaaaagtaccaagtctaccctgagcatattctcagacaaacattagccagtagttcacaatggtgatcaaggtgtgttttcttggatttagttacttcttctgaaccagctattcatcttgctttacattaaaatgtaggataaacatatttttttatcataaaataagcaagccagggggcattttgggaaaccatgtttgttgtatcgtcatgatttaattacctcagtgagcaatttgcttcctaatgaagacagtcttgttgaaagaacttgttggacttaatctcttcaaacatttctttattcatcatgcaccccaatgatctgataaaaggtctagtttggggatttgacaacaaacctgctaagattccattaatttaaaaataaaaaagcactgacctatccaagtaaacttcgctcactataaatgccctacacagaagtaccaaaaacaccagcagatttgctaaatttttctaatgtttacttctatgtatttttaccatatgaggagacattaccaaagtctgttgaccctgcattgatttggctagccgtcatggctatataaacaagaggacatcagcataaaaggtggtctttccttgatattctacccatttttcagaaaggatgagaacatattttgctgaagctactttgatcccatcagtgctgcctgaagtgactcactgggtaaccatggaaacggaatcaagcagtgagaagggatgtgtctgtgtggactgttttgatgccctggcctctgtggagataatctattagggattcctaatctgtccccatgctttcaggtttcctctcctttcacacttttgtgactctctgtaaaagccacagcaagtttaaaagaaggcaactgaacactgtaccctcaggacttgatgttctttccagaaatgtgtctcatatttaaagatgtgtgctcgaatgtcctaaaaacggactctcctcccagatccatttctctcccgtctatttctgcagtcctggtccagggccaggctctcatactatatttatgtcactctattttttcctgtgtctcttttcataaggttttaatatattaatacttacaaagagaagtatttaaaaaaaagcaagaaaataagcatctatctcattatacattaaagttccatcaaatgtgtgtatgtgcacctctgtgtgtgtgtgtgtgtgtgtgtgtgcatgtgtgtgtgtgtctctgtgtgtgtgtgtctgtctgtgtgtgcatgtgtgtgtgtgtgcatgtgtgtgtgtatgtacatgtgtgtgtgtgtgcatgtctgtgtgtatgtgcatgcgtgtgtgcatgtgtatgtgcatgtgtgtgtgtttatgacaccttaagtatggttttcaaagctgcatgtactactctaatgcaacctgacaaagttcctatcaagcaaactctatagattatatatctatggaacatgaagcttctaaaagggggcccttaaatttaaagtcaagttataatactctattccttctgtagtaaatatataagacatatagtaacaaaaatctaaataaaatatggcctctgcccctgagaagccatgtacaccatgaagtaaggccagatgaggtgatacaagccaaggctgcctcatagtgaaaacacatttatttaactcatcatgttaaaatgaagtcaatctctgcctccaggcaaggagctattacattgtatgggaaggaaggcattcgggactacttcacaatgtgcttctaataatgtgtattttttttaatcattgattgaaaatatcttttttaattgaatattttctttatttccattttatatgttttcccctttcctagtttcccctctggaaacttcctatctcactccctctccccctgcttctatgagggtgctcccccacccatccattcccgcctccccgccttcgcattctcctacaccagggcattgagccttcacttttaagaaccattaggaagaatctcaatgagggaaaaactcacaagaacccaagccaatcatatcagttggtcaaccagtcatgtgctcctcaacagggacttactggagctaagatgactcccttaagatccagggcaatgtttagcatatggtgggcacccagccctggtgtgctgttcagatgctgatgaaggttaaactgtgatcttcaaaaggcaggaaacatcctgaagaccccaatgtgaaggaaataaagggtagcgtcctgaaaacttgcctggaactatagtcttgggagggaggggaagatgcaaagggggggggggataaggggagtgggaaaaggcaacccaaagattattatgataaaatagaatgttaggaaccataatcctgaaagcaacagcagcagtagggagtactccatgttcagcagcaatcacaactaatgtttgtggtccgtgcctgtgagcaatcacagagtaacagttccattagcatcctcgtagggcttttaccagagctgttgttccaaagttaaacttgaagaaaatagagacttgagggattaacttgctaaaggatgttctgctagaatctccctcctgattttggagatagtgagggagatgctctctcagaggacatacgtgtatacctgccatagacttccaactagaggtgctagacagccacttacagcttctgggggacaaagcctccccatccatttgaatgagtggctttatctatcaccactggcaacaattacaaagtcgaacacctgcaggccgatgctctgtgcttctacctgtgggattatccagcaggcgagcacggttcatacctgtgaacccaccaaaggctgaagttcaatgtacacatcgacaggcgaaatgctcaaaaatagatccaggtctttttatagagctagtcaaagattcccagcaattgcttgggggtggggggagaaaaaggcttgtagttaaaatataaactgacaacacattcttatatgtggtgattgcttgatgtgctgagcatatcggaatatgccaggtgctgaactagaagcagtgagagataagtggtgagacagaaaacatccgaatctcacaaaaaaacacagagaaggcagacatggagggaataagcaccctatctttgctggataaacatgttcctgagagcagagaaatcaagagtcattgatctatggggaaggaagtcctgaaaggtgtgtaggagctgagtgagatccatgcatgtcaatagtctcaccagtcaggaggctgaggcaggaaaattaagagcttcagggcagcctaggctacatgaccctggaaagaacatgtagggcataagaaaaaaaaaggaggaaagatgtatgagatttagggaaatcaaagggttatataaatcattatatgtctaaatttggggagtcaaaacagagttcataataaactttcaaaaaggccaaactggagagaagtggaaatagctggtattgcaaatggaggtccagtaactgcaagtgcagaccaagttggagatgttgagaaatttgctagacacttattccttagaaaagagtcaccagaatggaggtgattggctcaagggggggctaggatctaggaagaaccctggggcataggataaaggacagtaaagagctgtggagatgtcagactggacacgcccactggagttcttaaaagcaaaccatccctctgaccactcgcaggcttgcccgaacaatgtttggggagtcggccccacaaatagcacagcactctgggaagtagtcaatactgaagaatagctggcttcacccaggggctgtgcatatgaccacctagctgtttttccttttgtcttgttaaaccctgcttgaccataccccacattcagtagaatatataaatttgccccagcacagcttaagctgtaaagctatgacactctcctaagacaccttagcactgtctaaagagcccagatctgagtaaaggagaggagaggctataccaagttaagaacttgggacttgaggaatggatacaaaaaatgtggtacatttacacaatggagtactactcagctattaaaaagaatgaatttataaaattcctaggcaaatggatggacctggagggcatcatcctgagtgaggtaacacaatcacaaaagaactcaaatgatatgtactcactgataagtggatattagcccagaaacttagtatacccgagatataagatacaatttgtaaaacacatgaaactgaagaagaacaaagaccaaagtgtggacactttgcctcttcttagaattggaaacaatcacccatggaaggagttacagagacaaagtttggagctgagacaaaaggatggaccatctagagactgctatatccagagatccatcccataattagcctccaaacgatgacaccattgcatacactaccaaggttttgctgaaaggacccagatatagctgtctcttgtgagactaggccagggcctagcaaacacataagtagatgctcacagtcagctattggatggatcacaggacccccaatggaggaactagagaaagtacccaaggaactaaagggaactgcaaccctataggtggaacaacaatatgaactaagcagtaccccagagctcttgactctagctgcatatttatcagaagatggcctagtcggccatcactggaaagtgaggcccattggacacgcaaactttatatgccccagtacaggggaacgccagggccaaaaaatgggaatgggtgggtagggaagtgggggggagagtatgggtgacttttgggatagcattctaaatgtaattgtggaaaatacataataataaaaaatatttaaaaaaaagaaaaaaagaaaaaaaaaagaactcgggacttttctaatggttaagcatccacttgcaagtcgaatacctgaaaagccaactgctcaccccccagagccttcccagctgtccagctgcaatgaatggcatacaggatggagagggaatatctgagcatatcagatgttagcaagcagatgctgaagatgctgaaaaccacggccatttaagtactaggtgccttatgtgtggcatattgaggagagcaatgggaagtagctgtggtgttactggggtctgtgggtttatattcaggcagctgctcacctgtttccaacctaggacctgggccttcctcgaagcaaagcgaacatcttaccccataactatgagatctatgtatgtttcattgactctacaaagacagttgcactagaaagacacatgctgaaaaagaaattctcatatgatgagcttcaatatttacatcgtggataaggcatactgtatttaaagccccgtgagttctgtgtgttgataacatgggaagttatcctaaggaaacagaactgggctaaggagagtgcttaaagcgaccggagtctccgcctactggttgagggcatttgcattaataccttggattaatttttttgtttgttttttttcttctctttctatttaccccctttagtgtttcctcagaatcctcctcatagaaaaagattacacagttcacacgttcaagttctatctcattaaaatttatccagtgagcagggcacagtgacacacaccgataatcccaacactcaggagactgaagcggcaggatcatgaattccatcatgggctgttatgcagagagtttgaaaccagccttgcccacattgttagaccttgtcttgaatgaatgaatgaatgaatgaatgaatgagtgaaataatgtgatatttttcttccttccactatgatggtattaactcaagtctcatcatttcagctattaaaattatatagaacctcagaaaaccagttaattttcctgaggatattaggtattgtttgagcaacatgaaatgaatggtaaaaaacccactgtactctaggtagcagccattcaatatttacagcatcatcagtgctcagcttaaagggacaggaaccagctcttgatagtttaatgacggaggaagagaatccttgcaattggtaggtccaatcccacttttagtaagtttcctcagaatcctgtcctagaacacccaagggtatctttctttttatttcttagcaccagtcagaaggcaaagacagatttgttgtagaacaacactattctgcaaaacctgaaggctttccacactgctaagaatacccacaaaaggtaacacagctgcttcgtgttaaactagttcagaatgaatcgcaggaactgtcttccaaatgataccactttaaaattcaaggcctacataaatttaacagaaatgtgatttctcatagttaagtaggtctaaaaactaagtttaggatccaaagaattacaaacgggttttcatgtgtttgtttgaagtaaaagggagaaagttagcttatgtattcatgaagccctgctcctttcttttcagatgagtcaagaaacttcatcaggcaacactgttactttgtgaccagcgttcagaatggttttgttctgaacaatttgttatttgctgtagaatctcccacagaatccacaactctttcatagatatcaatggtgttcatgtgtatatatgacttggatgttcaaagtattgtttgggccaggatctaaaacaaaacaaaacaaaactaaacaacaaaaccacatctttttttttccccctacattttgctaaaaagaaaaaaaaagaagctttgtggggcagggcagggagaatgcactcttctcacatgaaaagcttgctgaatcacttggaagttgagcaacataggccctaattataagagactgtaattctaagaaggccacagttgtctggcacggagcaattcctcgagtgatttacttaacctctccgaacaacagtctgttttctttctggcatacaggaagatctgggtgttttcttctactttactgtaaaacatttcgttttgttgaggtcatggcctaggggtgttgtctggtcataacaaagtaaaatgctttttctccactatgtttgcttcccaatctcttatattttgcacatctggtcaaaattctagttgaaaatgaccaaaaggaaaaggtaagacttccactgcctgctccaaaaacttccctatctgggcttcaaaactggccctgccactggctgttgttcttacgggaagttaagagaaaggcccatccctcaccatggtgatcttatcctcagagggacaacaaatcaagcattcctctatcacagctccagaggaggaggaggaacattacctttgtcttcctagtgattaccttcgggctcatactgtcttctccacagtcctaccaagtaggaacctgtggatcaccgcagtgtgaaatcgagaagcctgacgccaggaggcaaactagagtgtctctagtcatgtggagccatgacagtgctgtggtcagaacctaaactttcatagcactggttcaatgtggctaatgtcacactccctctcttcagggaatggattaagacctaggtcttctcaaggaatgtatagtttgtctgtctgtctgtctggatatcataaggcaaggagagggagaggggaaggaagagagtgtagtatgacctgggaccacatcagagacagtaattacatctgcaccttctgttaactgaccatctggtcagaagtatgtctaagtcagtctatggcagtttaaatcagtgattctcaatatgtgggttgcaactcccatagggatcctgtaccagatatcctgcgtatcagatatttacattacaattcatgtatatgagtacactgtagctgtcctcagacacaccagaagaggacattggatcccattacagctggttgtgagccaccatgtggttgctgggaattgaactcaggacctcaggaagagcagtcagcagtactcttaaccactgagccatctctccagcccctacattacaattcataacagtagcaaaattacaggtataaaatagcagtgaacataaaattctacaacatgaggaagtgagttgcaggatatttgaacaagctgtgaaccccaagattgtgttatttacctgaagaacccgtttctagttgtggttggctcagccctagtacacacctttaatccaagagctttctgtttactgtaaacaggaggattaaataaagtcaaccataggccaagagtcggagccagcaaccagttgacaggaagtgaacataggaaaagaagacagagagcaagagggagtggggaggataggtaaagagacacacaggaagtagaaaggagggacctggaggttagggatttctgagcatggtggagaacttcctttggggatatcagctgaggaggaaggtcagctgggtgctttctctgcctcaccccagcatctgcctcccaagcttctcttgataaaatcaaatgtttgagattttgttaaaaatgaacgaactatatcaaagggtcacagcattaggaaagtcagaaaaaccactgctttaaaggaaaatgaaattcggtataaaactggggacggtttccttataatgaggcataaatataaatttaataagagtgctcgagttttctagcctccacctgtgctcatacatttcttgtggctaaaagctcagttacttttcgacattaaaagccacagaggcgttagcgagagaaagctttgttgcccaccatgtgaataaagatgccggtagtatagggctagtgtaccagccttgtgtgacttttcctaggtgatgtaaacacctagtcactccatacaaaaagggcaaggatagaccaaaaaaaaaaagggtcctagtgaagtctttctgggttgctggtgaggttactgggggtaatttcaggaacgtgggtgacttttaaggaactgaagcaccaaaagtctcatcctagacaaaattgatctcttatataatctcagagaagaggggaaccccaggaagacttttggtgattcgtgaagtcttcggagcctactaagccactctacctctgtggtggaagaggcctaatctcatgggcctttcactcaggtcaccacagtggctccgtttccgggaagggggtggttatgtctgacccagagcaagcaggcagctggacagttggcaggccctccttcatggttttagctctgcctttttttaaaaaaaaaaaaaacaaaaacaaaaacaaaacaacaacaacaaaaatccctccctttctcttttggtccttttgggtcccacttaagacccaaacaaagtctacatttgacattctacccagacgaaaaggacaaaaaaataggcaagcaggacctttcctttaaagagtgtagtctcttgaaaaaggcccgcatgacgtcctctcaggcccactggctaaaatgtggtcaacagaacctgagaactgtaaccggagcctggtaaagtcgtgagtctagctaagatccctataaataagaggtaagaagggaaggtttaggaatctgaggatgttacctcccctgctgcataacctaactataattgataagagactttatgtgcagtactactggggctttgtttccaaacgtcaattaggaacgtcattgggccgtttcaacaattgaaggaagatgtctcaccttgtcaagcgctactcatttacagctaaacctaacaccttctgctaagctagtcatagccaaattcagcttgtcaccaagatatcaagacaaacattcttggagcatggggctctagccctctgccttggtttggtttatttacgacaaaaaaaagtaggttgagggatggagttgcagaaattgatccgtataactgttactctagatgtcatgaaactgataaccaaatgctgcagagaaaggggaaaattgttcaaatcggcttagtatagaatgccctagcctggtgacattgaataattcattgtagtgtacactacacgctgatttgagactctcggtaaaacaggcaagactgctattccattcttcctggcttattcttgacttaattcagaactgcagctcctacctgctgcttccatggactagataacactccagcctgcccactggtttgtgatgttaacattactgcatattacctaatgcattactccattgtcttgatccgacagacaataggcaaggtgagtttctgaaaaccagattcttcttaagtgtctccgggcaagcttgctgcttcatagaatctagcagtccatctgcagagagttgggctcattggcagggccaagtctgtcatccagaggccttcggtttgtagcaggtttacacattgtcagtcagttttgagccaaactgagaggggatgagagctcacgacgggccttatgatattataaaaaaagggagtgtgtcggaactcttgcacatgtttgactttcattgtgcaaatgaagaagaaaagtgcacacaggacaggtagagagtgacctgaaggcacccacctaattaagtaccacactctggacgtcaagctcatggaaaaaaacactttctggtcttgactctcagaatagcatagtaatcctagatgcagtaaacagagccttgaacacacactcaaaactgcccaaatttagtgacattgtatgtgtgtgtgtgtgtgtatgtgtatatatatacatatatacctatatatataacatgttatatatacatatatatgacaaatttataattattaaataaagtagtaatcagcaatgaaaaagaactaatgatgtagcaaacagttctcagttttcccttggatttctcaaacttttcctatattggttaatataatgctaattatattaatacatgaagccatcatttgaaattatgtatgatcaatcctcatacttggttactatggcattgcgttcagggaaaacagcagcttctgtcttttttttttttaattggcctactctttttttattattattattagatattttctttatatacatttcaaatttcaaatgttatcccaaaagttcactatacccctcccctctgccctgcttccctacctacccactcccacttcttggccctggcattcccctgtactggggcatataaagtttgcaagaccaaggggcctctcttcccagtgatggccgactaggccatcttatgatacatatgcagctagagacacgagctctgggggtattatttggttttatgccagggatctttctgttgagtacatcatctcatcctatcttccctctgatcctcacctgcttatgactgtggaaaccgatgaagaacaacatatagtggctctctctatgtctgccagctaggaagcaactgccacctcattcactgtactgtcctgactacgagcaaagccagatgacgtctctcgtaagtgtacacacagcaagcagtagactgagctctggtcttttccctttcatgtttcctctctattcctagtttaactcacttgacctgcttgtatttcttagtttgtgtcacatcctctccattgacctaaagctacacatatctataagcacttattttctgtggtgaggtacccatcttctcatacctatgtgtaatgctgttatgttaagaaattagtaaacaactggataatttcataaaactaataatatatgttgaatgcaggaccacaattggagaacaaaacagccttgctctgacaccagacacattcttggctctctgcatctcctccttttgttcaaaacagtctgtgtcttaatatcttactggaagtaagtgggttttttttccttttggcatgttgacaatggagcagttatgccctataatcaaaggaaaacatgaactggccatcgcctagcaactcactaaagattactcccagggaataatttatgggtctgagggtaagagcatgcaacgtgtaagttcaaagccaacagaccccacacttgctcattagggtcttttaatcgcctacaggcacatgagcatggtttttgaatgataccactgagcccaaaagcacacacacacacacacaaaatgtcacacatgggaaatttcacgtgaaagaaagtcaagagctgcaccctgtttggtttttttttttttctgttgttgaaaatctaattacaattagaagtcgctagtaataattttgccattctgctgctgtctttgctaaagcctcttccaccttcttcatgtaaagagacatctgtcacacaagggtggtctgcgtcactgcaacctggcctttcctgacgtgttcccccagtgggcatcgtctctgcccgtgaagtctgctgtactgagatcagtcaatcaaacgagctcccactcactcccaggaagccgcagcactcagagccttaatgagccaaaagaaggtgcgatcaacacagacttcattcggccatctgtgaggcaaagaaacaaatatggcttgagaatacttccttctgtctctccaatccatgacttaatccaactccgtttaaaatcgtttatgcagaaaaaccctgactggggaattcatttgaatgatgaccaaggcgaaggaggattccatatttgaaataatttatccaggattcacacccttgaaggctaggggatgttcacttcttgctagcagaggaggttccatgttggcaactgtgggtcagccccacttctaagagctctgtgcattttgatccatgaattattcccacaaccctaagaggtgggctgcactgccagccctatttctaggtgaggaaactctctctgactcagacaaagcaagcgagggactttttacaattacccatctgcatatggcagaaagggctttgacaaagctgactgggctcccggttcaatgctactgcttataacctggatcaatggggggcagcatggtcccctactccagttactgtttggaaaccaaaggttgctgggatgctgccggtccttaaaacaactccagtctggctcatgagcatttgctctgaaattctcttcctgtgcccgctgtctctccacaacacagaacatgcacccatttctatttatttctcaagcagcaagacttcttctggtgagggtcttgctatgcacttctcattggaagctaaagaaatgccttcattgaaatgtatgctgtgacacgctccactgaaattcatggagcaattaatgtatattattacttacccactgggcactgagtattttttttattcttcactgacactgtctttaaggtgtttatacttaagggaaatgtgaatgaaaccatcattccgcatgctcctaaaggatttaagctcaggctatgttttcagtcaattatatttcaaatgatgagataattttttttatgtactacataaaatagtcttaaagtttgttttctaaggtatttctttttttccctcacttattggatattttctttatttacacttcaaatgtatgtgctcgcttcggcagcacatatacacttcaaatgttatcccctctccaggtctcccctctggaaatcccctattccatcccctctccccctgcttctatgaggatcctcccccacccacccacccactcttgcctccccaccctggcattcccctatactggggcatcaaaccccaacaggaccaagggcccctcctcccactgatgtctgacagggccatcctctgccacatatgcatcaggagccgtgggtccctccatgtgtactctttggctggtggtccatttcccaggagctctaggggatctggccagttgacactgttgctcccccacagggttgcaaaccccctcaccttcttcagtcccttctccaactactccattggggaccccgtgcttgtccaatggttggctgcaagcatccacttctgtatttgtcaggatctggcagagcctctcgtgagcaagcacttcctggcacccgcaatagcgtccaggtttggtcactgtatatgggatggatccccaggtggggcagtctctggatggcctttccttcagtctctgctctacactttgtctctatttttcctcttgggagtattttgttcccctctcaaggtatttctaaagtgtaatggagtaccttgttattctgataagttagagtctatagaagcagtcaattttattagtgtttatcctgattttaaactgtcaataacatttttctttgtcctcaattcctgtaggctatagttgatgtatttctttaagataaaacaattttattattttaagatgtttcatttttgagatatttatatatgtatatgataacacataattatatctacccctcattttcccttttgagtgccccaatacccttacaacttcatgtcttttttaaaaaatatataacctactaaatcaagactaagtcaagttggtactactcatgtatgggtgtggagccattccctggagtatgtaaagtctaccatttgccatatacaccatagagaatgtttctccagcgctttagagacgcctctttggctaaaagtccttattcttgcagaggacccaggttcaattcccagcatccagatggtagatcacagccatctataactgcagttccaggggatctgctttcctcatctgacctctgataataccagactagcacatgatacaatacatacaagtaggcaaaataatcgcataaaaataaaccaataggcgattcccccacagttactgacaatagctcctcgatagagggtaaggcttgaatagcttgattctgtgcaggtcttgcacaaacaactatagcttctgtgagtctatgactgtaatatgtaaagattgtacatcacagaactcctcactgttctctggttcttacaatcttcctgttatctatgatattccctaaggcttggtggtaacagaattaatatagatattattgtttagggctgaacactcagtctcctatctgtagctctttgatttgctacatatctttccagtgactgctgctcaagaaaaaaataaattcccagaccaaggttaaaagcagcctaggtctatacatacaaacatgaatatctgggaagcaatttgacagcatgaccatttagcaaattatcaatagcccaagggcctatgactttagccaaggggtatcaataaggataaccataccaggaattaaatttcctcctattgaacatgcctctaatccaatcagacaccattacccataatggtgatgccgcctttgccccttgcttggcagggccttattgtaagcccttccccaatttgttatgctttccttagaattcaggagtagtttgtggagggaaacgctgcagattgcaggagacaaatttaatgctgagataaagtttcctcaagatcttccttttctgtttgaataatcctaccttatagtattgtaagagaataaatactaatgatgttagtcttaacatcaactctctcagtttaggcaaattatagaaccaactatttctaaaactaactatgattaagtaaattcttttatttgcaaatgttaacatacattgacgagaaaactttttataagccttaaagcctatcataagacattccattatgatttatttacctttaacaagatgatttataagccctttaatctgtagtctcacaatacagttccttatcttttcatagaatcaaatgttagaaagatgccataagataaacgctaaaatcactgtttgaggaattcaggttgcaagattcattgcttttttgttgttatcataaaacatgtttttgtgaagattttaggagactaaatgaggagaaaaaagcctgaagcagttaacatacagacagaagtgtattaacattttacagactgctgtgattctgctgggtgctggcttaatgtaatcctgaagttcaagtatgaccttgatatgcatcaaatattggaatcattgggtgcagtgagaggctggtgacacaggttgaagttttgtttttgcaagacactgctcaaaaatatcatggcatccaacctgctgaccttgtgcatggttagaagcattccttttgaaaaaaaattaaaagtctgttaaaatgcaaatgtgttagcttaataagagactatctcatcacttgtacttttaacaaaaccccaaaagattagatgttaagctctaaccccatgcacgtagccaattaacttatcccaattaatggatgacagttgttataattgagaaaactaatttctcgttacacttcaagatcagtgatagtcactaatatttcacttacagaattcaaaatgaaggtcccaatgggaagtggtagtttcggggtgcacagagttgttctgatgttaactgaattcatacccttggtcagaatccaaaagtagatcaattaatgtctgatttcacaaatgtaaacaaacaaacaaaaaaggtaaaaagtggtgttcactatcaacatgtggcaaaattaattcataggctgctactttaatgacacatggggccacaatgactgtcatttctttgagacaggaattcttacagcccaaactatgcttgaatttactatataatcaagatgaccttggatttctgttctcccgacctccacctcccaagttctcgggattatgggcttgcatcactgtgctcagccaatgttgactgtttttgttacatcatggagcacagactcgttctactctctttgagactgtctggctcacatctctaccacagtaatatttccagagttgccctggtgctaaaaatgactatctccttgaacttcctaaacggaaaagaaaccttgacttcagcacttcaccgtactcattctttccccacgactgcccagtgtggagccataccagaacaagggcttttcctccccgtgggttccaccctatgactgtgtttcctgcctctgaatcaccttctcctgatggaggcccctgctgtgtcgatgaaaatgagatcataaacaaacatgtaagccctcaaggcaggaagagtgctctgcaggaaaactcccaaagaatagtggaaataaagaaattggctatttatatggggtggccaggaatggtctctctggtagggtgatatgtacataaatgtcccccatagtcttgattatttggacacttggtccccaattactgacactatttatggaggtttaagaggtgcagcctctttggagggagaatgtccatgggagtgaactttgagagcttaaagctttgtctacttccaatgtgctagctctgcctggtgcttgtggtttaaagatgtgagctctcaacttgctaccatatgtcccgttataatggattttttattcctctggaaccgttatgcccaaataacctcttccttctatagcttgccttggccacggtgttttatgacaggaatagaaaagtaactaaggcaggtagcatctgagcattaagccgggcgactaaaggacaaagctggtgatagatggaagtactctgggccgagaggaaaacgctgggatagtagtgggcttggtatgtgcaagcaacagtgaagtattccagatcctagaacagactgggcagggagcaagagtggtagccatgggcctagaggatgggagatgggaccatgagttggagtcctttgaacaaaatgattattctctatcatgttacagccacctctctcagaatattccagaatcagaatacaacacatgcaggtacaagcagaggaagggaaaccagtcgtgaggcactaaaacagtcaaggcaagctagaagatgctcacagagaagttaaatttgcatagttgtgagttctagatatacacaacattataagatttgaccacaaatgaacatggtaatagcaattatgagtcaaatatgatgtcaatgctttttgaggctggaaagcagtaaaatttttggcagtacattctagaaagtgctctaccattgaactatattcctgcatctccagtaccaccctcctcctcctcctcctcctcctcctcctcctcctcctcctcctccctcctcctttttagatagatctcatcgaggccccaggatgatctgaaactcactccagagcccaggctagacttgaacttgtaacattcctgccctgcctcctgagtactgatatttcaagcctgggccactagattcagcaatggtgatgctttttacagagtgatagcaggtggaccaaagatctgggtcatgtgcctatttgacatgcacaaatatgtatgtaaataggcagctgttattccaagcctgacattctgaggatagtgatttatgaatgatcaaacagctacagtttagctcaactgccctttaaaaataaaaatctactgactagtgtgattgcctaaaccccaacatatgttgagaatttccattgatcagaatacagaaaagagagcagtggggcagaagtaatgagaaaatacgctgaggggtaaaaatgggagagaaggtggatgaacagcaagatgcttcgtctccctgctctacatttgtggtgctttgactcagaactcactgaggtgatatggtgtatacatacatatatatgtatacatacatatatatatacacatacatatacacatatacatacacatatatatgttacttgtcttgctgatgagatgaagtacctggaaaaataatcagtttaaggaaggaagagggtttttttcttgctttgttttgttttgttttgttttgttttgtgtttgtttgtttgtttttctcacaatttgaaagcataccctatcatgatgtggaagccatggctgcaggaacttgaagaggtaactggccatactgaatatgaagtcagaaggctggcaacgatgactgcttgtgctcagctcatctttctgtttagtgcaggacccatttttatgtagtgtaggactccttcccacggaatggaaccatgcgcattcagggcaggtctaccaatctctatctccgtctaaaatttcctgcaaagatatgcccagaagtttgtttccatggtgattataaattctagcaagattaaccatcatatcgctcaaactgaaatattagctcaacctttgaatttctacacatgcccctcgttgaatttgaaacactaaatatctggaaaaaaaaaagtcaaggtctattaaacaatcactgttttgtttaattgtagaagccactaaattagtttcaggattatgccagagtatctaattagacttacatgtattcatttgcaagttaagaacagagctgtaactcagttgtgtgtctgagaaaacataccattatttgcctgtagagccagttttctctaaactctgccaggcaataggacatctttctctacatctctgttggtgccttcctttcagtatgggcagcagacaggtacttgcttagtttaccattgggagactccaccagtacacaacacatacaacacatatgcataagacaaggctctacccatacgagaccaactatgcaactcatacaggaaacaaaggaaaaaaaaaaaccctctgcttcagtggtagactctagtatccataatacaaatacaaacatcacatataaggggaaaaataaataatggataaatatagagaaagcacaattcattttataatctcagataaatgcagatctgtttgaaagcatatgctttgaagacgttcaactgctaataaaacaattcctcttgcttatcttattacagttacatgtcatagaagtttgaatgcttgcagtgagctttggaaagcaaggaacttgggtttagagtggagagacaggatttagagacatcaaagagactagagaacaggaacgaaaggcttatgtttaaagaagagtacatcaattttttatggcattattctaaatgtagggagggtgtgcgtgtgtgtgtacatgttataatttactaatatgctcctttcatttcatttaaccactaataaaaatgcattctaaaagtaatataatgttacaaacacataatttgttacaaattataaagagaaagttgccaaaaattatccttattccagtactgaaggttagcccttcttttaaatctgttgtttcaagtcaggaaaatataaactgctttattgtaagctagtttcctcttattgaatagcaaaaagatgaagatatatctagtttacaaggtctgaatcaaaacttttgacaaaaattggattaaagcttaatataaaatcatgttccatttatattttgtgttcatatatattaaaaatctgtatgtatatgcatgtatgtgtatatgtgtgtataaatatatacattcattcattcatttacacagagacagatatagaaataaacattggtgaaccagaagtaatatccaaaattcatatcttaagaaataggacactgtaaacattataacaacaacattaaatggtcttcagaacagcttgactcttgggatggtgctccctgttaaatattatcctttgtagcatcttttctccttgccgtaaagatttgaaagtcaccaaagccacatatttcttcttcctcctcctcttcattaccatgacaacaaaagtagtaggaaacaaaaaagaaaaatagatatgtgcataatacagcataaaaagaatgggtgagataattccaggaaatgctcagaatagctaaattagctttattccaaatatatatgaagtaatttactttttataatgtcggtccagctgaatacgatgatttcattccaagtgttccggtgattagctgaaatgtgactcacgcctatgaggcatccttccctccctccttggacaaagtggtcaggatcaagataaatgaaaatattatcagccaccgtgggtggttccatggatatcctgagccttacaaagtgaagacataccctatatgcttactgactttgtgtttgtatgtgtgcgtggaaatgtagtttgactggattttattacgggtgactgtgtggtaatagatacaaaattaaggaaagtcatattcatgtgcttcctttggttccatgccatttcaaaggatgctgtgggacagacttgggagggttctgagggctactcaagggctcttagcaatggaccacagaaggagtccaagccacttaaggtgcaatcaagaggggcctggaacaccccaaggcaagtggtaaaattgtttgctcacactgttatgcgtcatgcttgcctcctctcatgtgcagccagacgattaccctccaggtgttccttgttctcatgggacagtaaccaatagcctttgcctctatgccaccattaattgattattggcccccatttcctccaccccatgtgctagactctgcttaatctgtgtttgacttacataaaatccaaaggactagacatgcttataccctcctacccaaactctagggtctagaccaaataaactgtgggacttgggtagaagtatatgctctttccagagtaaaatgtcttttttattttacttatgaagaaatactcagctgagagctagtgttataccaaggagggaaccccaagatttagtttacacagattctgaggtataacgagcatttgcaatgtttgactaataattaaatgaagaatgaagaataccattctctgagatgggagatgtgtgacagatgggtttgtaggatttgtagggaaagtatttgaggggaaaggaatatcttaaactcagaacagcacgagaaataaatatgaatcccatttgaatgagagctcagatgtcacatgcagagagtgggctaacccagtgagagccaggcatggctttgctttggtggatactgaaaattaggttctttggcagaatactactctaagtacttaaattacacagagaccctttaaaacccatttgctgcgtataaattgacatcttacgtgcgtgcagatgtttatgtggagcttaaaataagactcatgggacccatttgagcattaattttctggacatggtgtccatcaatataaacattccacaactcatactcctcatgttctccctaatctgtctcctatcagtattttcttgacacatgtgccataggattgcattaaaatatagccaagaacagtaagccgtaacttgtgttaagtaaccagtttaactccaaacattattataaagaggggaacaggctgacatttttgtatcacagactttgattattgtttccaaaacccagaacagcagacacccacacgaaaaatagcttcaaatgccaccaggctccccgtgctgctgtaatttagcaagcgatgacatgggtgactctgccagttagaagatgtgatgaaaatattggtcagaaatacagtgtgctccaatgttcttgccctgtttcctcaaaatcggtagactttgctctttaaatagaagccatgcaaagaatgtggcatttggaatggtaaactgtggtttgatttattagtttcagaggacttctctgctgtcaactctaacagaataccgagaaaattaataattcctgtcactccctgtatgcctcctgcttttacaaggtgatgataatttatggactgaagtttgttccttttttaagtgtggatttgtaaaatggataccatcttagacataaattcccaacttgagaaccccagggggaggacacttgagataatataaacatgttatatacagaggtgggctgtagacctttttttctggagttaaactggagccaagaggacagcctaactatcataggctgccactaatacatgtctcatcttaccctggtcttatcagaagaaatatgaatccataatgatcttttttcttgtggatgtcaatatgcaaatgaattgttaagcttggcttctggttagcttctgcttgggacatgtaatcagagtaatgagtttgggacatgtaatcagagtagtggtccatacggaaactttcaattgatatttatcgactatatactctccttgattcagtatatctcagatgatagaaatcctgtggttttgagttttaaaacaagtctttcattttatacatcaaaatccatatttactcgaatttctaggttttatttttgtgagtgtatgggtgtgtccaaggctggtgcaagtagaaagggaacatgaggggaggagggatcaaagtaggggacaaaacaaagataaaggatgcatgtgtcatgaaggcagaatcaatgctgttgaaggaagggaaggaacccaacgtaggggaggcagggcatgaaaaagcacacacaaaaaaaatgcaatgtatgaaaatgttacaatgaaacttagttgtgttgtaatcaggctgttaaagagtctggtacatacaggtggtttggtttggttgggttgggttgggttgggttgggttgggttgggttgggttggattgggttttttccctctggcccacattaacaggacacatactttagtggtaggataacaaaacagctggtcagtgatggtgaatgccttttatcccaacacttgggagacagcagcagataaatctctgagtttggggccagcctgctctacagagcaagttccaggacagccatggctacacagaaaaactctgtcttgaaaaacaaaacagttatattaggaacatgtgcctgaaagctccctgaaaattgagttgttggattctgcccaattctgttaatgtatttgtatacatgtgtgtatttgtgtacatgtgtgagtttgcatttgtgaagttgctggttctgtaagaaagagctaacttttgagttgcccgtatattttacttcctccccaataagtgacattactggccttcagccataacccaagaagtatagtcagccatcacattaacgataatagaataaattagagattatctacacacttctgaaaagtgatcactctcctcagacatcctgtgagaatcagtattagcatatgtgatcccgacatagattctgggtttccattcccccctgctacagcacaatgaggaaacgcttgtattttccttaaaaaaagatgaaatgattttgaaactggtggttaccaggttatctcaagtctcccaacagacacgcttccacctgtgaacctggaacacgacattctctgcacattgtggtagagtccacccacccagggatcccaggagacataaggagtcttacaagcccatgcctcagcggcacccccatgaagacgcacccaggctgttgcagatgggaagagtgaatggccttgtccatttgggagtctaaaaagggagcctccttaccttttcaagagtcataaacaggaaggattttttatattttttatatatagagaggggacagatgactagtaaagatcagaccaagtaagatttggttgtctatattaaaatatgagcaaaaatcttggtagaacctcctgagcattactacttaactctcatgtcaaatcagcatggagttttatgagtcttcattcggtgagcgacaccgttctccaatgtataatttaagaaagaatttgtatgttgttttccttgcctatttttggtgggctgagtgacaggcagcttagttttggctttaaatagtggtaaggtatgaaggactatattaggtatgaacaaggaagccatgccgggaactcatgagctgcctacggactagaagttgggttgcttgggttagcatttttcggaacaaaagagcaataaatgtaaaatcccattttgtttcagtacatataaaccttaaagcccttggttttagcatggacctatttatctttctttttttttttcttttattggatattttctttatttacatttcaaatgttattccctttcctagttctcccctcccgggtgctccctcacccaccacccactgccgcctccctgccctggcattcctctacactagggcatcaagccttgacaggaccaaggacctcttctcccattggtgccccatagataaggccatcctctgctacatatgtggctgaagccatgggtcactccatgtgtactctcgttggtggtttagtccctgggagctctgggggaactggttggttgatattgttgttcttaaataaataacatttggatattgtagttcttaaattcggggtcatcctaaaggtccactggcatgaattttctgacactgaaagtcagtctgagtgcacactatatagtatttcccatggctgctaaaacatgactgacagctcaccctagtgtctccaccgctttgcctgtggcctcaccaactccctgccagcattcgctaaacaccttccaagcctgcttagactcgttttcctaccaggatgtcctgtgcataaataaagaagatgctttttaatatgatgcgagtgggtccaacatgtcaggacagtaggatcacgatcttgatttataagaaaaacacagttgatttatacattgttttaattgcgttttaaaacagttgtgttccactaaacacacagtccattaaatcccctggacttatttcatgtcagttttgagaaggtagtctaatcttgtccaccaaatctttgtgtttgctttggccaccttgaaggagtgcatcttttcttcagctaaagattaatgccgtcacaattatttctctgttatttttcttctctcctgaatattccctctactgtaccaatgagtattcattttttttcctttcaaaataagaatgttaaaatcacacagtcagagaaaggcacttcttaaaattagtgttttttttttttttttttttttggtttttcgagacagggtttttctgtatagctctggctgtcctggaactcactttgtagtccaggctggcctcgaactcagaaatctgcctgcttctgcctcccgagtgctgggattaaaggcatgcgccaccacgccgggcaaaatgagtgtttctttgcctgttgtttctcctgaactcagggcacacagggacttcctacaagaatcttggtggatttcttgctaagttcctgaaaaccatccttgtacaccagaggagtcgtggtacatgtgtgataataggactacattcctgatattagagattaattactctgacaatgaaaattcaagtcatctgttttttagcacaagttcatagtggcagtggaatgatatgctaaatagtctaacaaaatatcataagcatatttaataaattctatatctttcacacagctttttttcctctgcttttgacccattattacctccttgagttttctacactgagctagtttaccaactataaaatatgtacaaagggactgaatatagttttattctgaataaacttagtaagaaatacagtattgaattgtgaaaactaatcagctagatttattttgtcctaatcattcatcaaaattcaaattctaggtaacaagtgggttttttatttcaatgcacatttataataatactagaactggacgctcaacctcatcatcgccaagctgtgagaatgttttctcaggtgttcaggaaacaggtgtattaactcagaagaaacgtgtgactgtgtctttaacagtcaattaggaatacaggggattattttacagtcataattaggtaacataacattgccgcagaggtattttagaagaaacatactttttaaatttctggggttttcttagaaaaagcagccatagccacgggcctgggctcagagaaaccagaataacgctttccatatgggtttgcacagtagctgcgtgaaagtaatctgtctcaggcagccagtattctctgtctcagaagagtaaggctgtggttctaggttaacagtctccatcttattcatcaaccagtttgggactccatcacacattcctctcacactgtgtgttctcccgtatcccccatgatccagaatttaattgcgactatgctgggaggcttaggagggcttgggcttgttttcaaacatgggttcaggatgccttgaagaataacacatgttttatttttattaagactccagagagctgagctgcctctcaagtgtcggtttgttgctctgtcatcttggaaaaatcattctttttaaatcctcacagatctgtcctccgacatctgttttcttacagaaattacaggattggaatttaggggggaaaatatacacttagtaaaacacttaatgcttatctcaatttatgctgtaaagtatgaaatatgggaaactagaccagccaaacgcaataatgtttttaatgtcagagtatttgtgctatcaatacattaaaaccagaatggaagatggaaagcttcacggaggagggaaattctacaaagtatacaacttttgaaactagttattttaaaatatcaaggatgctccactcaggagaggaatatgtgcttcttgcacagtaacagaaagagaagccagtctcaccaaggatgctaaaactcttccatgggtcacacagctcacgatattatgtttataaacatctcgttcagccctcattgagggtcctaagccgtcagactgatcaccactatctttcatgccactttctttggctttagtagtcttgactgtagtcaagctaagtgggctaagctgctccaaatggttctcgaagtttgtcttatcttatttatggcaatgtttgtaaaaagaaaaatgtcctagctaaatggaacaagctgcccacccagacagcagactttcctctcagttccaacaagctgccaacgtggggtgggatgatgggagattggagaatgcttacagatcatctgataaaccatttagtttgcctcgatctgaagtaacacaataatgccctgtatccttttgggaagtactagatattttcttgtaacatggccaaaggtaaaggtctgctttaacaaactttatatgttggtgaatgggatacatgttgttcacctgtcatatttgactcatggaatctgttgaagatgatagtcatagatggtatacactgtataggtgcttcaaagttgacctgctttgaatccagtcctccttgccccgcctccccatgtcttctgtgacaaacaatgcagtatcacagaatgggaaattgtaaagagcggtgcttactttaacttatgtttcaagtttaaaggaagcagcttagattgacatatggcaagagacaaagactatgtgtattgtctgtgacacttcggatctgtttccctccgcttaggaagccatcaggattcaattgtgcaagctccattctaatggccttatgtaatcctaatcacttcacctaaagagtccacctctaaacaccacagtggaagtttctacactcttgacagcccacagtgaattttaaatctcatacatgaagctctaggagggacaaactatattcaaaccacagcaccatccttccagtactgctcaggtcacagtcacctgaatagtgggactattctaatgcagtgtatataatctttctgtgcctgactcaccatctcacccttggggaatctttattttcatgaagagtccatttgacttttgatttatgtaacgtaagcctgtgtaactttcctagaactgtactgttacattgaacaaatggttgtcttaggggaaaatgtgcaattaaagcatttagaggtatcctctaattatctgaaagggttataacagtaagtggcagtaggaaagtaggacactgaagcaatatttcatggaaccaggcaaaataaaatcaatatttatttagagtatttggctgacttcatgtgtgtatgtgtagggtgtatctacttatatgtggtataggcatttgtgcacatgcacataccagtgtgttatgacacctgtctatggaggccagaggttaacactggtatcctcttcagttactttgcaccttttttaggacaggttctcactaaatcctgatttcatcagtgggcaagaccgactggtctgagagccccaccggtctgctccagtgttgttgcacctggtactttgccaactgagccatctcctcaacctgtgatgctgactttgaagtattggaaaaataccagccagtcttacctgcctgttgctgactttttttcttcaatatgtctttgggcacgtgtgtttaggaaaagttgtgttttgaacagctcacgtagtaacaacccaaaaagagcatttacagaattccttcaacccatgattttgttttagatttttttccccaagtatcaggcagattaatatgacttaaaagaatgatatatgttcttataaaaatcactgtttttatggctctgtgaccttttgcctctttagtgcttgtcattatttctcctcattcccaaaaatgatgttgatccccactgcagtgtctagtttgccttatttatactatgagcccatcatcaaggcccattagctcaataattgtgggaggcagcattcctaggcagggaacatcctgcccttactatctactgtgatgagttttgtgcccgcccacttggaggcagaggagttgatgtctcatgtgggggaacaatttataggaagtgttcagaaaggcagttaaggtgtggttttgcttttcaaaactcaggaactgtaaaagacaaaatgaactgatcggtcttttcttgtaaatatctcagagtagcatgttgacatattcttgcaagtaagtgatgctaaatgtcagcgtgaattaagccatttggctgtaattgagaaggaattgaggggtgaactatttcagcagttttgaatacttatcatcatgccatggtcagagagaaaaaggaaagggcattgatctcttagggcattttaatcagaaagtgggacgcaaaagcggtcgtttcacagaacacaaaaatagtacaagttagaatctgctgtagatccttaatgtgcagagtattcccatcctcatgtttaagatcatctctcaacagtctaacgtcccacagcgtcttcccactgtaggctatcagtgtacttgcatctaaataatacataaagtaccagtatgttacttcacaacagctatatcagtctgggtgattaaaactatccaatggggggaaaaaaataacaacaacaacaaaaaaaaaccaaagccactttaaatttcagatcactttaaatttcagttcaagtttaactctctcacttgatctatgaccttgatagttaactcagttctataaaaataacatgactgacatagaattcctgggtaaaactgggggaaagatgttgtttctgattttcttcagaatggatggcttgtgacgactaatcacaataataacagcaatcacaaattcaagcatagttatgtctgtgtccacagttttgttgctgtgcaggtgtgatcaaacctctcaggaccccaactcaaaagaaaaaagttgcagtctcgtctttgatgcaccttgaaaacaaagggccactctgttctccataacaataataataagggaaagacagttgggtacaattcactagatgtttgacgttatgtcatgtcattgctgaagtattaacaagcaatccaatccattgccatacacataactgaaaaccaaagttagtcctacctctagataaaacaaactcattcccatgcatatcctgaactggtatataatatatatatatatatatataatataatataatataatataatataatataatatatatgttgctttgttctatcagctttgtaaaaaactaatttaagcaaatccagcccacataactcataaaaattattttgacccgttaatacgccaggctcttgttctgtagactgccttcttcgggtaaattatttctatttcatagtacattgtcataatcttggcccccgttcaattccaatttaagaaaatacttgaagtgctgctgtcttctagctgcattcaaacactctaggaatttgatgccttccagactaatctgcgcccgcccgcccgttatgcaagtgcaatcaaagacactttcagaacagaacaaaagagagattggattctctgtagcttaaattgcttaaatagagtggaattgttaatggattttgtgcagcaaacaagggagacagaatcatgcatttttattagtcacccaagaagcctttggtttcaggttgttcttagcacacaaataccatggctcatctttaagaacttccaagtgtcttacctgattaggaagttagtcacttaatgttttgacaattaaaacaatataaagttaaaataaaaactaacaaattaccctcagaggtaacaggatacatcactttaaaaatgaacagcccaaggatttgtggcgccttcctttgttctacataatcctactttgctgtctgagagtcctgtgttttgcaaatatctgcattggattctaaggacacttgatggtattagaaacattggtttagagactagcagctttcttgttctgacaattagccctccttccacagtgatctttgcatcagtgaatattattctgctgtgaacactgccttcctcatgtcccactacaacgtgaatcagtccagtcgtcagcatagcatgttgccttattcagaagggatggtgaggtcgagtttgggaaatgtccttacaggcctcctgctctggggactgtttacctcttcttgttttagaagtggcctcagccatggtcccagacatccctcgaggcgacttttccatttattttgtccatttaaggggaacatattgagaactttgctactgaaagattaaaataaatacattgaaaggaacagtctcaaagctccagtgcagaccacactgccttctcccttgggtccattggcatccctaccatacaggcaataaggctgcccagtccagggtttagaaaaatgctgaagtgcccagaaatgtgtttctttacttatgtagattgaaaactaaaaagcaaaacgtgttataataaaatttcctttgatgacttttaaaagtccattgtcctgagaaaattgatccatgtgtctaaggtaacgatttcaaatagtggctggtttgtttttggttttgttttgttttgttttgaagttctggaaaagatattaaagaatgaattgtccttgtagaacaggataggtaattataaacaaacaaataaacaaacttcctttgcatactgagtttagatcacaggctctcatacatgttgggcataaaaattaaatttcttaaaatgaaaatttgggctgtgtgtgtaattcactagtagaacatatgcttgatttgaatgaggctatagtccatagcaaagaaagaaacaataccagaaaaaaagggaagaaaggcaggtcttggttttcaaccattagtaatcaccattaaatgaaactagaactttgttacagtaagacaagaatgattgacccctaagatgaatggaattataaattctgctctccttattagactttggcttaagcaagattaatgataaagtggtgttaatttataggttaggttttcaacctgtgggccaggacccctttggggtttaaatgaccctttcataggagtcacctgagaccatcagaaaacacagatatttaccttaccattcataaccgtcatgaagtagcaacaaaaatcatttgatgatcggtagtcaccccaacacgaggaactgtcttaaagagtcatagtgttaggaggatggagagccactcttataggtacactgaaaccaaaaccatgtagatagcagcattctgtcctatgtgtcagtgagcagacacagactcttacactctttttcttttcccttacaggaaaactgaagaagttaataacaaacccttcaaggtgaaaatgaatacaggtacactgtctctgattgtttgtttgcttgtttgtttgttttactctttagctttgctttttaatagtcaccttggttctacattagcgtagtgctatattgatcataaatgtattgccgagtttctgagcatagggaaagttatattcccttaccattacatcccaatattatagcccaaagtagaattttttgttagctgctattcttgatcttttattatatattttcttcttctctatgtatatgtatatgatttcatgtaggggtacacacgtatatggccaggtgtaggggggagcagggaggagaccataggttacatttcagtatcattccttgtagttcaagccacaccttgtttttgaagcagggcctcttatttcacccagacctctgcaattagactaggctaactggctcatgagccccaggtatcctcctgtctccacaactcctgtgctgaaattataagcacattccacggtgcccagctttttaaacataggttctgagagtcatatgggggtttccatgcttataaggaaaactctttattaaccaagtcatgagatcagccctttatggctatatttttttccaattaattcttagagttgcttgaaattgtatttatacatttgaaatctctcgcttaaaatatgttaggctcaaaggcaagttactctggtgaacaatatttaaactttcccaatcacaaactgtttatattgacaaagtgagcagataggagttccaaagcctcacacaaaataaactcaatttattcttcatcatcatgatttgcataaagccataagcatgttatttttagacttgtatacattatccctaaatattttaacacaaatgcctctgaatcctgttatatagattttaattgcaaaatagtttacaaatacctaatatatatatacacatccttttgtctccatagtagatatatctagcttataatttcaccttcaccttcattgcctcaaaagtctgatatacagtaattaaagaaaataactctcattgaaatcctatgactgtatcatggatgatggctggaaagttgtttcagccagccaccccataacagagcataaagaaaacccaggacattctttctcaacaagttccttgtatcagtgtctagaagaaggattaacaactagctagtaagagccagtctttaatccctagatcaagtatggaggtatgtgccaggtccacctccctgtggcgtctgcttagccgaaacctgctcaaactggcctcagagaacttggtgccagctggctcctgagggtggagtccacatgtagatagatgtttggagcaatggacaagacaagggtgttgaagagagaattgatgaccttcacagagaaccaaggagaggcagttggagatggtttgctttcttctgtttccactgcctaatgatggctcttatttcgttttgtatgtacactgtaaaatggactgtgaggagcctggtggcatgagtgtagagccactcctgaaggctgtccacataaagaaatgaggtttactcactgttcagagggatcccctttaaagagttaagttccacacggcttcccaaaataggattttcctatttgttataacgttgatagatatgcatatataattgtatggaacataccttgcttgtatactatatattcaacagttggtcttcctgttcctataattgcaacaatagtcttccaacttctctgcttcttcttcttctttaactttctggtatctggaccaagttgctgctgaagagcatcaacagaaaccactacatcagccttccatttgtaaggagtgatcttgattctagatggacaaaaatgtgcataaaatggggttgtttatgtgtgtaaatgtatctacagacatgcaaatttggtgataagctaaaaccctttgtttaaaattccaaagtaatgtttcagtgttgctataaaaacatgctaccttaaaaaactacagatgacaaatatttatatgatatttaggtagaagataggtacatattgctttaggcaactgaaattattgtcactgtataacaaaattaagggataattgattcccatgtaactattaattaaaattggcttaccttatctatcattaacaatatataatattttttttaattctatatgccaggtctactatagtagctcagttgagtaaagtacttgctgctcagccatgggcatctgagttcaaacctcaagcacccaggtaaaaagctgtgcattggagcaagcactacccacagtgccggcaaagagaagaggcaaagagaggaggctgctggggttccccaggctggctagccaatccaagtcagtgggctccaagcacatgaaagaccctgtctttaaaaatgagatggaaagagaaatggggacaatactcttaccgttgacctctggccccagaagctgtgtgcacccagatgaacagttcatgcatatgtatatgtatacgtatacatatcacacaggcagaaaaaaaaccatattttccagtcactaaagtctaaaaattcttttatatctaatttttgctcttaataaaatacacaacaaactattcaaggaaaatgagtttaagttttagaatgtttaaactatgtcctatctccactcagcaattgtgacccattattttcttttttttaattggatattttctttatttacatttcaaatgctatcccctttctcgggtcccccctcctggaaaccccctctgccaccccctctctccctgcttctatgagggtgttcttaaagccccatgaaaggatgcccagccaggctgtagttccagaatgactgtgaaggtaaggccagcaccatgccgcttcagacatgagctaaatgccatagatagcatcctcacctgagtccttaaaatcatcttcaaagaataacataaaatatccaaatataagtaagtactgaatattaatgtctaatggtttacctattctaccaatttcaagaaagctctggtttgcctcttctaccaacttcaggaaagctcagcttttaaaaataagctccttaataagtgttagcagaaagtctccatttacttagcccgaagattcccacacttgtctcacggtgacaatgtctgagtatttttttcatattgtttctagcccaaaagaagcattgaacaattctatttattaagcagttcactgcaaacatataataagtatttatgtcctgataatttaaaagtcatatggcaaaagagtatatgtgaattgaaagaaaaatagtaatttactttcagtggaaccacaattacttaatagtggtatgtgcgtgcctgttgtgccctgggagatttctcaaaccatgaaatgaaattgtacataactcttgttcactgaaatgactttcaaaggacacttgctttttaacattgtaaccaccctcctagctcttagagatacaatgtgatcaaaataaatataatatggcctgtaatatggaaaccctgaactacttcaacctaagccttccttccgtgtcctgctgttttctcaaagtttttcaatatgctccaacagccttgtgagttcatggaaatgacgcagagcacctgagcacagtttaaacagaccaagtttcagccacgtctctagctcttgtcattctgagacagactgttttcatctctgttcattttcagacacaaagagttgaaagaaccagaaaataaaaaccttctaaaagtgacgtcacttttcacttttgacatccctaactaaccagccctcagaccagccagtagtgactagatcctatgttgtgtccagtggcaacatgtccatttctcaagacaccttgccctcataggatttcagcaagttgaaaatagctatcggtgttctgctgaaggtattttcagttgtaattttctaccctctacagaaaagttcctagctacaggatttttattcattcagcttattttcatttcttgtttcaactcgggtttcctgtttgatgatttctgcattaaaaaattataattttaagttagatttttctattagaaaagttacaccaatttcgtgttctattgacgtcatgccttatgactttaccaataattaactcactcatcattccaactgtatttactaatgtgaattctctcatgtttaattgagtattttccctatgaagtaaaaaataagaaatgcatgtggcaagacacaataattttacccccagaattatattctcacattgttggctacactatgcttttgtgtatgttcactttcaaagaaaaaattgaggttactttgatttgaggaggaggagaagggtgggaaactattgcacatgcgagattatcaaggaatgtgggagcagaatcagagtctattcagaaatagaatgctaacctttcagtctaggagtcttgtcttccaaatttagaagtctccacttctcagagcatagaaaatggctggtgcctttgcacacatttcacttcacaatttgatttttcttcacatacatatatataatgtcatacctacaattcaaaactataagggcaatgcatttgttttcaaagatatgcttatttcaatacttgtctatcaggcctgctcttgacttcaattagaataactatttcagaactgtaggaagacatgaaattgtataacgttatgtgtttctttatgacctgtacatatgaagtatacgtcagctgaaaaatattacttcaagaattgttcaatcaaggtaactcatccctgatgtttctttaggaatcacactgattatctttagcaaccataagtaaaaaagagtaaatttagattatttatgtgagtgcatattacagcatggcactagtttctagacttagtgtgcgttaaccaaaaggtgtaagcaacattgatttctgtatctcatatttcattagataacaagagttgagcattcaatataaagccttctgttgcattggagagcattaccatctctctgagcaaacccctggttgctcactttcgtctcgtttgtcttttttagtttggggatgggggtgaaaatccccaggtgtattccatgactactaatgctcagctgttcatctttctcatgagtgactgacacatctcacttaaaatgcatgacatcgcatgtgctttctctgttttgccttggcctctgccatatcatgtttttgcttccagatagcggtgggtgtgctcgcaaacgtgccgccatgtctgttacgttaacatctgtgaagagagttcaaagttctccaaacctattggctgcaggtataacgtcactaactcacggtgtcacacctgaatggcttcacctcacctctctctttccagaatcatcttgctggaatgtgtacagaggctttaaatgcctttcaagtcccccactcaatcttaatttttctagtcccaagaatagctcctaccctttctcgttttgttctaaaaataaaaagtcaaaggaaactgataccttcttaaaaacaaacatttaaaaatataattataagcatcagtcacttgccaaaaatatattaacttcaagtgttaactatttaagtttttgttacctcatgaactaaagtaacatgatacttgattaagatatcatccatttcttcgagaatttatttggttcttcttcaaagattgcaaacaggaaacagatcttcttgcatttatctaatgcctggtttagaacatattagaatcctgattaatttagatagccatgagaccacagataaaaatgtccttcggaaagtaattgaggataagatattttagcatccactaaggtagccctcttttttactcaaagtctgcaatgacttacctccacctgagacacaggcttcatctggagagtctgcctctgtggacgatcagctggagtccacctgttcctagagcctttacagggtagcccatgcctcttggtaactggttacttaattggttgacatgattgaagcctaagattaataagctatataacagaaggaggaaagtaatggggcctctaaataatttcaattgtcattctgcatttcagtcttctgtaaacacatgtttagtggtcagttggtactgaaaatgtcctacccagccttaaagaaaacacaaacaaacaagagaccttttaaaggtgacttccacattcttccccaacttacaaatggatttcaaggtccaagtttaaatgttaagtcaggaacctcatattggccttctttatgaagcaaagaaacgaaaaatgctgcaatgtatgtaatcagatcttacatgggtttaaaaaccactctgagtgtgtatgtttgaacatgaatgaatatgaggaggtattgtagaagcatagacttacgtctctagatgcgttagatggatgagagtgaggagacgtgaagtagaaggaaggcacatcacagaatcggaatgcaggaactgcgagtttctttgacatttcaactaagtaagatcccagttgtgaccactgatgcacatgctagagaatgacttaccatgtgtcttagttggggttttattgctgtgaagagacaccatgaccacagtgactcttataaggaaaaacatttcactggagctgtattacatattcagaggtttaacccatcgtcattatgacaggaaacatggtggcaaggaggtagagataatgctggagaaggagctgagaattctacatcttcatctgaaggcatcaggaagagactatttaccacactaggtgtagcttgagtatcagacctcaaagcccgcccccacagtgacatacttcctccaacaagaccacacttcctaatagtgccactccctatgggataagcatttaaacacacaagtctgtgggggaatattcctattcaaaccaccacaccatgttaacaattcctatttattatcatctataaaaataacctgcaaaagagaacattgggttgaactagaggtggcatttgagagattcaaactgttctacaagcaatcccctaccattcaaattgttggtaaagactaaatgtttcacaatcagaatagaaaaataagccaaatctgtcctgatggcctgatctatgaccctccaactacttagagttcaaggcttcccggactatccagcaagtttaaggcaagtctggcacactatctcaagatttaaaataataaaaccagagttagggatgggtgttgctcagtggtgaaacacttacctcacatgtgccagacttgtggttcaatttcctgtacccaaggtaaaaggaaagaggaaggaaagctaaataaacttcagcaatatgagtgattagagcaatctcttatctcttttatgtcactagaaataagatttttagcagcgactagaatttctgatttaactttaaaagaatatttcttttgtatatcttgacatataaagcctttaaagaaattttagctatattttaaataaaagaatcaagatcctttatagccaggatcattgtgtatcagatttcacaagaacttaataggcagggaatgtatgtttcaacattgctagagagttaaccattcactgaaatgtatgctaaaatcatcataaactcaagctttattaaagcaaggcctcatcttgatgtgtcatttgtgggcctgcccatagagtttattattgttaatatctcatgggtgagtctaggtacagtgttctctgtttctccctcttggggttctatgacccccataacatagtctctattgtgaagaaacagagctgggtctctaaagctatcaatcagagagtatgtattcccagtgtttttcaatttactgccacacaccctttctcccctacctcatctacatccctggtacttccacaaacctggcttccattgcttcaacaacagcacattatcaaaccaagagtaatataaacttcctattctcaagtaaataatttccaatactcaaaatcattactgatgctgcttccctgttcattgcccttctctcatccccagattttgtctttgtccaccatgtgtaacaccctagtgggcagctaatctctgtccttaagtccccagagcagaatcctaaagatacattaccatgctcactacattagctttctctctagaggtgtcactgtctttcaactgaaaaaatggtgaattccagctcccccttaaacactatgtatagaatccaataaatatgtcatgaataattttacaaagtgatttttaccagattactggatcaccctcatttttattccaatttacaataatatataatgaatgaaaaactaaaggactcccatgattctttctaagatcgaggctttatgggtccaatagaccaaacagtacaaactgattccctcaggtggccatgtaggaggttctgagacaattgatgactagatatggttaaacaaactgattttgtaccaaaggcaatttattgactatgatttattttccacgacttatgagctaaaagataaaaaaatatatagctttcctgtttgaataaagacttagaaaaaaataaattcaagagaacaatatgaaaatgttatcttgtacagtagataaatctgcctctgtgaaagtaaaaaacaaaaacaaaaaaaccaagctattgaaacattagtcactgtctaatagagcagctaaagatagtcagttacagatgacttcagccagccacagagctggcggcttattttaatgttccaaaaggttctcattgtttgcaaaccagattctttgcaatcctttaattctgtattcaggattcatatatccattttaggccatgataaaccttaaaattacatggtcgcaatattattatatgtgaaaattaatgtttggtatatgttctagttgtagattgagtccctcagatgtagatatttaacaaatgtcagcctgttgaaattcaaacagtgctcagacctctcattactacatttcaggtactctgttttagaactgagataatgtcgaccatgcatgtggttctgggctgagtatgtttacgggcggtttggtttgcttcacactcgagttaatttcaacattgtttttctttcagggcgtgagtctcagtctccagattcaggtacagaaaaatattgtgaacagctattgtgctttgtttcaaggacattttttttctttttccatatccatagccacatcactgaatttatgttaaattcaaatttcatacgctgttccacataacaaattataattctatcaagaccgttttggttttagaaaaacaaatccattttctaacacaccaaagaaagaaagaaaaaaaaacaaaacaaattcaagcgaacgtagatatttctgtgttcgatttgttttcccttaataaaagcttggagatcttacaatgatcggaatccagagacactgaacggagatgccacatattcctctcttgcagcaaaaggttttagaagcgttcggccaaacctgcaagacaaaagatcaccgacccaggtaatacagctcggtgcatgccgagtgtgtagctcctagacctctgttttctcatcctcctggaaatctcattcctagtgtcctagctaaaatgcttctgccttctctacttgctttgcctgtcatgataacgtgaatacagggcttgaattttaagcttaaaacaggtaggattttgttcctgttgttttagtctttattctctggtcaagcttatgaaagtaggccagcttctactgtcatctttaaggtaaagtataattattaaaaccctggcagctgttcatttggatctcagagtatgagagtcagtgtgacattatatgttggatgaatatgagacaaatagtgagcttttgagatgttagtaaaactgtacatgcaaacatgtgtctatatgacctttaggtctaaaaataggacaagataacatacactcaattttagcatagtttctagaattttgaatgggagcaatgtctttgtaatgtattctcaactgaaacatcttttccaagctgtgagaaaatattaagatacaaactattcttatagtatggacagtgaccattcagtctagactgctcagggcagagtatatatggatttcttcagggcaggtttgacaatgtgcctctcatgactaacttggactttctttctattttccctttttatatcatttctctttctgaacacttttggccatgtaggcaccccctccaccagccagaaaggagagctttgacagtcagtccttgataaacaatcagtcaaagggcgacattttaaactcattagtaactaacatacaaactccatcttgtacagaggactttactaaccttaaacctctccacggaacgatgcattctagtgaagattctaagcagacagtagtgtattctgaggagtccagcacaactgtgtcgtacacccagaaaatcactaacccactaccagcagcctccagctccagtccggcccaattgggagacatcaacaccccatttctacaagaagactatacacaagattctcaaactcgaagaatctctaccttgaaactaacccctaaccaggacctaggaagtagtttcccctttaacacaccacagtttccacaacccactgacgttccatcatttctgaaaaggtcttgctcaccgatcccaaacccagacacacacacagcatccctttccattcagatacatgatcttgaaagccacaaacagtttcccgaggttcctccagagtctgcagagatgcctcttcagcaagatagacaaacgtcttcagatgccacgacctgtcagtccccagcggtacattatacttgccaatctctgcttctgtgtgtatcacagagatgctaactcttgagtttgagctttgtattaaacctaatgctttattagcttctatgcaggaagggaaaggagaaagaaactatttcagaaccttactgactaaactcaacaatttctttgcatctatttatttgcacacaaattattctacaaaaagtatgtttaaaaagtctcctctttctaagtttttttaaattatttatagatgtgttgtttcttaagacactgtcaaccacatccatctataaagtacctccaggtactgaaggcctattttttgttagatctttgggagccaggttaaccttacttaaatgtacatctcttaagaaaaatcttaattatagtactctttattttaaattcaagcagtacttattctttcgtaaactgacacatcctcactaaaatttgatcagttggtcaattcagaaagcacactaaccaaattttattacctagacttttaggaggtcgttattttctacctacgtagaattctattatagcaccattgttgttacgtttaccatttctatcggacagaaagccatcttcccccagcttctctaccaagtgaaaaggcattggccacaacagctttaaagatgagctgtagagtcttctccaggcttggttcattgttggctagctgacatagcttccatagtaacctctctgtgggcttgaaattgaattgacaatggtaactaatccttccttcataggatgtggcaggggaagagacttagaactttggtggcagctataatataattggtagctgccactaagagagggatcctggcagcagctgtgacaggaccgaggacagtgcttccctacgtaggttctcggcatctgagtcattggagatcacacaaacatctttggtgcgacagattttcaagctgtagaaaacctttaactgataaagtggcttacaccaaggttcccctcacctacccacagtgcagaaatctttaacgtgggtaattaaaaacataagtagggggtttacagatctcttgcaatattccctccacttcatttcatgaaactcgttctgtagcacaactgtaaatatctcattttctacatataccaggctggccttgaactcaccatcctcctgtgtctgccttctgagtgctgggattataaggcatatgacgccatgctcagcctgagagcccaaacaaaacttttaaaaacttgtgatgattacaataatagcaactaatgagtagaaggtttaattatatgctgccatgatgctaacacatttatgttactcttttcactgtcacaagcagtactattactgcctgcagtttacagatgaggcaactgaggtaccgaagcaaagcgtctgtagcatcagctatgtaggaagcaaagcagcctgggcactccctgatgactcggagggagtgagcctggtacccagaaacggaagataagtctagttggaactcaggagcccaggaaggtctaaaggagcaaaatccatctgattctcgaatgtaggattgctgtagtgctaacagctgccttctctgggacccatgacatgtcgctccagcaagcaggagagaagtcacaggagcattcccaactacttgatctgcccaacctaatttggttcttcagaatgatcttctaatgtttcgaaacatagcttcaatactttccattccaaagattttgtcagtatccagactggctcagaaagagtggggggatcattaaagaagccccacaatattaacctgatttcaaagttaggatttaagacctcatcatttttattcattcactaaatatttcctgatttcttaatatgttaatgttctcaaagctcggtcatcatcttttgatgcttgctgtctgctgtgcaatttttaagtaataaaacaagcaaaatttcatgcgtgaaagactgtagaaatgacgccatgttaaatggtgatgggaagatcatatgccacattaaatgggatagtcaaatagaccccacccaaaaggtagaacaacttggaggagtgaaggcatgttctgggctacgcggtgaggctggagttgcacaaccttaactcagaggtaacaaaaggcagaagcccttgtaaaggaaagcaatgcttaggcttactaaaaaacaggactccttaggagatttggaggctaccactagaatgattcggctaacattttaaccaaatcattccagcatctcaattgggataaaggaggaaggcaggcgagcaagctaggaggctgctgtagtaactcagaccaggaaaaaaaaaaaaaaaagaaagaaagaaagaaagaaaaggaaaaggaaaaggaaaaggaaaaggaaaaggaaaaggaaaaggaaaaggaaaaggaaagggaagggaaaggaaaggaaaggaaaggaaaggaaaggaaaggaaaggaaaggaaaggaaaggaaaggaaaggaaaagaaaggaaaagaaaggaaaagaaaaaagaaaatggtgtttcaaaacagggtggaggcatcagacaggggaggtgagaaatccaatggtgggacttttactttgaaagcgggacagatatcagagaaagaatagacaagcttgagaagggcttatgcccttaactgagaccaagtattagcaccaaaccattggtgtcagggaaggcacatctctcgacatcgtgaggagtggtggggtgtgggatgagaggatttggggctcaggggaaaggtcctggttggagattaacaacaaggttcagtttacagaagccttttgtagccaatagacagtgaaatcaacatggatggagaatggagggaacccaagaattgagcttgtacaaacctttacattcaaagaaagaacctgtccagcagactagcactggtatctccaaaaaggagaagaaaatccagggaaatgtgccattctaaaagccaagtgaggaaatcacgggaggagagggaaggcaacttcaaatattgttggtaggagagtgagttgaaggaagaaagcacacagcagagtagaagtgagggggagatttgttagagagggctaaggacagacagggaggaggccaattagactgcggttctttcagggtgttattatgtgcctcactgaactttagtttcttcatctataatgtggggttaataacaagattcatcttagagagtctctcagcaggtatgataatatatatagggaatttggcataccaccttctacatagtcattccccaacgtgcagaagctgttattatttcaaaataatatttcccaaaccatgcagcagtttggaaaagtaaattgaggttatcaacaatattttttcacagatgaatgaaaatttatttcatcagattaatagtgggttctactgtattacgctgtcaatattattgtcaaaaggtggcattttcttgtgctttttatcttaattttgccaagaatgtatgacatctacccttttcacagtatctttggaattcatatatgtggcaaacatgtatgtgtgtgtgtatgttggtatgtgtcaagtgtctttttgggttattctcctctttatttattcagacacattctcttactgagccaggagctatacagctgtggttagtctagctaccactttcccacagaggtccctatctttatctcctcagtgctgggctttccagaaaatcccaactctggtctttgtatagcaagcactttatgaattgtgtcatctccctccggcctttcttcataaattttaagtgttccatatacaacgattaactctagacataatgtcatatagaaaatcctagaatctgtttgtcttgcctaaatgaagctctacaccctagatagcagatcagccccctctctcagctccctcttggccagcccctagctaccaactttcctgtatgcttctatttccactacttcagatgcctcctgtaagtggaatcacaaggtatttcttctatgactggctgatttcacttacataatatcctctgggttatccatttcaaactacatggatacaaaactgtcttctttttataaaagactaaaggatagctcattgtgttataaatcatattttctttgtctattcttccactaacgggcatttaattttcatgtgttccctaccatgggatacttcatttttaaatttcattttctgtttaatggtctttcacaatggtttttacattccaaattctggaaggaagacataataaatgtcaagggctataagctacactctatgaatcgtgtgtgtgtgtgtgtgtgtgtgtgtgtgtgtgtgtgtgtgtctagtctcccatgaaacaaaaatattctaagaaataaaaagacaatttccatattttaggagttccatttacatatatgttaaagtctgaaaattagtgccaaaagaagattgtacgctactgttagagctattccccgtatctgacaagttggacagatggtaacagctcctacagtttatgtgtaaaaagaccacaaatgaagtatgttgcccttctgtgtgaaaaactttcctactgctaaaaattgtcattttcttcatgttgaatggatacaaatgtaagccaaatgcttaggaaggatgacagacagacacactgaaactgcccatggcattcgtaagtgccgtgccctttgctactgaaggataaacttgtcccttccattgtggggtaacaaagccaatcatgagtcagtgtcactcctacagctgctactgcacagatggtgaaaattcaagggtgaatctctatcggtgttgtgcagaagagagagaaaaacttttatttttgctccatgagattaatatgtaaatattaaggaaggcagagcgtggtggctagttttatgtcaacttgggaagaggaaacctcaatggagaaaatgtcccccccccccacacacacacaccagattggcttgtagtcaggcctgtgttgcgttctcttgactgatgatggatgcaggatgcatagctcactgtgggtggtaccacccctgagttgctataagaaagcaaacgaagcaagccagaacgagcaatccagtaggtggcactcttccatggcctctgcatcagctcctgcctccagattcgagtctggaatccttgccctgacatctctggaggagagcctatatatatatatgttgtaagatgaaataaacctatcttccctgagttgctttaggttgtggcggtttatcacagaaatggaaaccctaactaaagcacagtgtaatgcgtaaatgtcagctgcattcgatgatagaatgcagaacttcagagctcactttctgtatcacccccacctctgcctacccagaccactgatgtctttcattgtaagaccagtcaggatcctgtaatgtctttgtaggtttgttatgcttgtagttgaacaagtctttggcaaacttccaggtgtgtgtgtgtgtgtgtgtgtgtgtgtgtgtgtgtgtattaaaataattgaatattgccacatggtagaagagaacagaattaatttaaaagtagcataagatcccctctattccatctcctaccatatgggcagccctttcctgatacacacattctactctgatgggggctccattagattataaggcagcaatttagtgcttgaggaactctgagatctaattattagaagtacttcctatatggaaccataatcttccttctttcaattctacatatttatcccagggaacaaaagatgtgaccttttcttcttcctctctatgacaactttcacataaccgtttccttcccttccctggtcttggctctgtgaaaagcattactgtgccttctaagcactcccttttcaaatcacgatgcttttgaacagctgtgacggcactctagacaccctgacctgtatttccttctcaacagctcactcttcccaaactgcaaaagataagttgtgttaatgcttgtagctgacatatggggagaccaaggccaagggaacttagacagcttgcccaagtcactgcagagtgacagctggtaggttttcctgcctctgcttactttcagtattaatcctgcactcatctttggcagtgttcttagaatatgacagcttcttagatgtaaaaatcacaccacagttcctgctatttaatacccactagatttgaacctcctggatacctttctgctgtactgctatcccaccactgagccaccctctagccagcctccttgttaattcgccatagagcctcatccttcattttcttacctttggcaaccatcagatctcctagcgttctagattggattcatttgcaccaaggggctcaaccttatttgcaataatttaaggcattagatatgtcacagcttagaatgtcccttccttagtgaagagctgcaagctggtgtctagttcctccctccatagctaaggaaagtggatggcaacttagactcaacgtgagtggctattgagcaatatttgaatgcattcactttacatagtctaaaagtaaggaaacagaaaccgattaaactgatctttctacagtcatctacctgtcactaaatatggcaggtagtggaaaaaccattcttgtttgaagagaagttttcctactacaggctaatccgggacaggaaaatatgtccctcttttacacgttttggttctttgttcatgctttgcactggggatatctgtaagaggtgatgtggtacagctgtttactccaagatgatgaccttctatcacggagcaaaacctctcaaggtggaagggatgaaaagcaacaggatatttaggacagtatttacaggcaagtgagacaacagaatattccgaggggaggtaaagctttctatcctgcaggggaacgtcattaagacaggacataaagcactcacaatagcttcatgaagtacctaaacctagccagtttcactagccccttcctgctcccaaccaagattataaaacagcaatgactactgagtcactctcaaacaagccaagtggcctacaagagtctcaggcaagctgggccacctggaagatacaaaagccagccacgctgcctggaaagggctcagcccaacagacattgtccaaacctattgtgagctgcacgcaggccatgcagtaaggaaaacgcttccacttctcgggtccactcattaagttggatgctcgtcttcatttctgacatcagaggtgtagcagatgccaagaaactcttttgttaggcgtctttgtctccttacatggttagtccattcctggttgttccaactcttgagttatacacagctttggggttcttaaacctattcttcccccttcagtttctttctcctttcttaagactcaatgccaacagtagctttaactaacccattctaaccatggtcagtggctgctttttctttccatttatttacacacatcagtaccatggctaactctgctagcatatttaaaacttccactgccttggacagacttggtgagtagaaagtgaacaggaattcttgtttccacactattgtttatagcttgatcaatttaaacattaagtgaggggggataataggtttatattagggaaccattttgatagtcaggaagcaataggaagaaccaggctccaaagttctttttgagagacaaactaattctacccgagcatctgacaacttgatatcattgcggtgtcattaggacaaaacctgaacacttttgggctgaccgtttctactgcaataatattggagcaagggcctttgttcaaactgcactggatccatgttcttcacacacagtgtgtttgacacctaatccatctgactgtatttccttagagtgtttgcacataaagccaatgtttcaccttctctgccaccgtgtagaacagatatttttatatacttgaatgatttacatctcccctcattattcttttccctcaacctcagcttgaacaccagcacttacttgccaatatactgcaggtaaatgcctcacagacacccaggcaaggcacagccgaggcctcttcttcacgcctgtctgtgggtactttaaccagcccacttttccatggggcagtggctctggcccactgccaccacctgatgatctggggtctgtcagcttgtttatgcaaacatcctttcctagctcctaacagccttatgcacagccatgccacaggctctctcaggttatactcttccctgagtgagcattcctcccagtctgagagtgagtcctccacagccattctggttgaactacagctgggacactttgacaccactggctgctctgagacaccctccccaacctggggtcagagatctgctgtgacagatggcatcaccttagcaacccctgctgccacccctgtaattactcttccttcctttgcctccaccatgttgtgaggaccgcactcgttggctatccggtgttgtagccgaccattcttatttgcataggtgttgattagcaaaccaactgtacgccatctgttagcgaaagctattggtgtcatcctcattaaacacgctcggtgctaaaatgtttactgatcgccccttcttgcatttcggtgctatttatggtaactctagaatgcctggcttctgagttactgtttctctggggctcgtatgctataaactggtttatttataaggcactttgtcagaaacgtaaataagtagactgcgatcatttgctaggcttaaattatagagaaagtccaaactgtttcagatattgtagcttactgttagtgcctagaacatgatgctcccctgtgtgacttgcgtcgctgtgtcctggtttaatacttgatgtactgtctttctcccatgagtgattctgactgcagagcactaattgtacttactgttctctggacggcagccacctgtgatgaacactaccgtcatataggagtgaacaatgtaaacaatcttagtccatcttacagaaatggagcctgtggttggtttgtaatatttctcctgagccatcccagtttcaaaatttttgaaaacattctcacgtcaacatgttttctttcatttatacaacatataaatagttctcgtgtgcatgatatcattgaaatacatctgtaacttcgctcagtgatcactaatcagcgatcactaaaatcatagctaaaatgatgcaaatttttatttttttatatttatttatttgtttgtttgtttgtttgtttgtttattttggtttttcaagacagggtttctctgtataaccctggctgtcctggaactcactttgtagaccaggctggcctcgaactcagaaatccgcctgcctctgcctcccgagtgctgggattaaaggcatgcactaccacgcccagctcaaatttttattatgcagattctgtcactgatggtaaagagaccatgaactttcagtgaaggatgttcagctttgagcagagtctctgaaattgctagcataggttctgtcacagggaagacgtatctctaccacatagttgctgtacactgtcaagacataaaactttaacttccatgcacagagaaatgccacaagccatattttttaacttctaccactacagaaaagagggaaaaaaacctagtttcagttgtttggagtgacttggtattcatcaagtggctggattgttttttctggaaataactagactaaaccaacccctacccacagataacctgccactagcctcaggtattcagtggatatgggttcttccctgtcctactgtgttagggaaaaaaaaaagttggatattcctaatgaaaatacccaaattctaaaaattttgaaaatttgagacattttaagcattgatgtgacattgtaagtttaaaattccacacttgacttcatgtgataaattataaaaaaaaattggcagcacaggctgctcttgcagaggacctacattcaattcccagagcccacctgacagctctataatagaatctgatgccctcttttggcgtgcagacatgcatgcagacaaagtgcccacccatgtacataacatacatggattgaacaaacaaacaaacaaaacaacaaaaacatcaggtgccctgaaactgattttttataaaatcgtattttaaagttttatataattgtcttcagattatgcatataaattaactataaaaatatattaattttatatttagattttgggtccatgtctaagatatttaatatgtatttatgaatatcccacatccatatctgaatgaagcctgaaatagttctgcccctaagcatctggatatcggatactcacctgtactaaaaacattagttttttttttttaatagaaattattctgtctttttcattcattattataacaaatcaaagttgacttaaacaagggggcaaaaacatctgtttattattcagcagagtcacataaagactctgaagtactgtgcattatatttgctcaaatgtccagttcaagaagtccttaatatatggctggttgttgagagagagagaggagagagagagagagagagggagagagagaatcttttctgataccttaaagacatatttaatgagtacaattcttataattgaataattatggattttaggacacatgtgatatgacttttaagtaaattagctttctttcagagcatttgaaaacacgataatcttaaagttagatcagataaatacccactcatctgctgcggaccatacttgtgtaactgacatttattctgctatttaaaagagtagaagagtgtgtaagttgtgagtctctatgtctgtgcagatgtgtgtttgtatgtacatgtctgtaatgttgtgttaactaaatgctcttactaatgttttatctcatttgcatgtgttatccggtttgtataacactcagcggtatgctgtgcaaagacagtcctgagttcaacctgtatgaactaagctgatttagctccgtcacagcatgtaccctctgaatgtctactaggtcatcaatcccaagttgcatgttttaacaactacataaggagcacatgtgtgcctgtctcaacaagaagcttcgggtagcattagaaatagaaagtagttagatgtaaaacaaatagctcaatgtatgaagatatgagaatgccaagtgaagtcaaagtagggagaaaccagtgttttaacatctttacaatagtcttccaggtatgtggctggggaataggccatttcctgactcattaggccaaacacttgccttctgtgtcagtcaccttgttttggaaactttgattcattagaggactgggtctgtgagccagcccctctcctcctgtcagagagcatccatttcaaatccaccatgcagaaggatgagagagatgagactgcttaagacagcgagagctcagtgccctgcccatccacttgccagtgacccacgtaggtggcacccctgttggcactgcagtgcgcccacaggctagctgctcttgtttccctaaccacttcccatgccctctgataatataaagagtgagaaaaaaaggaaagaacagagaaaactgggtgggggaggtctttggtccctctgacaccagttttcaaaaataaataaaagccctgtagttgattactgttcccttagttggaaactcttgtcgtcatataaaggagtgatattcatggggaagcatgtgatataatgggttctttctgcttctctcagagccagatcactatcaatggcaactctggtggcgccgtgagtccagtgagttactatcagaggccattctccccttctgcatactccctcccagcctcgctgaactccagcattatcatgcagcacggcaggtctcttggtaagtactgcgaccatgactcttctgtggcagctctatatcgcaggagaaaaatacaaggtgacatagtgacacggaactacctgacaatcctctggtgactctatctagcttgggaagaattagaacagaaggggctacgttgtagaaaagaggacccttgctatttggagatgatggttccagccacagtgagcctgaagaaggctaggtgatatttaagtgatggagaagaaagaacacgacaatacctagtgatcaaaggggagcttatgggacccagaaaacattaatgtagcgtgtttctattgaggtggcttcttcctttgtgaaagaactttccttctaaaatactcttcagttacacctatggaaaaattgtttagcagttaaaatagtgcaacaaggtgacaggctatagtcacacaggaaaatcctttggatcacagttgtaaactattcaaactgatatttcaaggccatctgtcgtgactggggaactgggaagcaaaggagaggaacttaagtactaccttcagtgaggattccacaatttatataggttcttaatcccttggatattaaaaagtaggcaaagccatagcccttggtgctggggagatggctcagtggataagatcactgttgctcttccaaaagacccagcctcaactcccaacacccagatgctggtccatacccatctgtgattccagtttcaagggatctgataccctcatgtaacctataagggcaccaagcatacacatggtatatatacatacacaccttatgtaaaataaaatatataaatctaatttaaaatatttgttatagtcttccttcaataataattatttcctaaataatcattaagtgtgactctttaacccattgcccgtcttagtgaacacagttcatcccattccaccaattaaaataaatgctcaagtataagtagcccttgactttaggcctaaccagtaagtagatttagactttaggcctaaccagtagcacatgttcttaagttacataaacaatggaaacacgaaaatttgtttcaaaaccttaagcctatgatattgtcaatcttgtgaactctttagagcctcctgggaaagtcctgtgcttgataaagacagaaacatttttatgtagccaaatatattcgcatagcttaatggtaataaaataagtattttgtagttactaaaaatttaatgtaaaaattccaaaatgaaccattatgtgttaagttgaaaaggcttccatgatattgagaacctagagagttttcagggcaacatagcagaggatgctaaggaaaatgtctatacttgaacctctcaaaaagagagacgccatcttacagccactgcaggtcagcaacagagagaaaactctagaacatagagctgtacaccattctgtccttgatagcagacccccttccctcttcccacactggcgcttttaatggaaagagtgtgatatcacaagtttagtaaagagtgctctatgtcgatttcaagcccactcatggtagaactcagctttcatggtcaacaaaacctctatacggttttaaacatcgtcttggggctcattaaagaagagtctaaatatacttgtgccgtttctaacgctactcttgggagccatttgtgaggcttgtaatgatctccttttagagtgtaagaaagaagagcttgtttgtgccaaatttctctctttgacagccagtccacagttcagttttataacacactccactatttcaacattttgtgatggaattatgcgttattatacacgaaaacgaaactttctaagtcattttagccataacattttcctaaatgatcattaagtgggactctttatcccagtgtccaacttagtgaacggttttccctattttacagaataaaaaatatacccaagtacagacagcccttgacttcagacctaactagtgagtagattttacacataaactgtttgacatggaaagaaatttcctgtgtaaacattgaatcagttccaattagctaaggcagtgatgggaggggagcaggatttacaagtctgctctgccctaggtgaactttaagacaaaagattgcaaatataacagtttatggaccatataaaagaagtataaaaagagctagctttcattgcaaaagctgcaggtttgtacagtcacatgaactataggtggggacagacttgatactctctactaggactgtggcgcatcctacatgctcagaaatcactggttgctgacaaaagtcctagcattgtggctatcctgttgaggacagtaaagaattaaattaaaaggtcaatcagggcaaaataacattgtgaccactcagagtggctgggaaaatgggatttgtataagcaatgacacaggaaacagttccatttctagactcctccattccattcagagataccttgagttgctttcctgttgtaaactaaattaaaagtggacttaattacagccactatagtaatatactggatattagccttgagagagcttaatgctaaatacccatgtgaaaatgagtcaaattcttaaatgtttattttatgttgttctatgtgacatcatcataaaatacacatatataatataaaagttcattatacatgatataaatattagttgtaattcatatatatgaaaatgaaacaaacacatatatatgaatagaatcagcaaatgctatcctgaaacaaacaaaaaaatgttttcagcttccacagaaaggaactaagtgacagactttgctaagacaggtcatgcagtctttaaaacagcaggaagtcacatcactactgtttgacaagcctgccaatgatgctgattttccaaaactattatttttacctcagaatgaacagaacaggtagtgtatacatgtgttctgttacccctgaaagtattccaaagattcataatcttaacgtgaagatagaaatttgtttttttttctttccattttttattaggtatttagctcatttacatttccaatgctataccaaaagtcccccatacccacccacccccactcccctacccgcccactccccgaagatagaaatttgatgagcctcatgtaaccatgtatgtaactttaatccttaaaacaactgtctgtcttgaaggataaaccgccattgcatgggcatttcaccataaagccaacaatattaaataaaattcaataaaacctaattactgaaaaagcacttatttacctagaagccttcacttttctagtgcgtatctagttctaaacataattttcaattgacttttattttcattttatttttacggaattgtatctttggatcataatcctatgacttctctaaaacaccttactactttctcacgatggcagccataagcctcatgaggatcattatgagttgtgacctgagtacactttaccaggtttctttcggcttctgctgcccccaccccacccccacccttgtcctgtccctcccaagatttcgggaaggaaagtgaggtgggacatgctcagtgtctcctcaatggtggctgcacatgtcattcatcaaacattcctcctctcgtccttctttgtaagacaccgaagtccttggtgtcccatgcatatgtgtaatacctgctgctgaacgagacagagtaaatatgggaaaaggcacggaggtagaaaggattctacgatggttgtcaatcaatggacaagaggcaccattagtttatacccaatgtgttccctgtcactgtattttccactcagattctgcagagacatattcccagcatgcccagtccctggatggcaccatgggaagctccatcccgctctatagatcctccgaggaagagaagagggtcacggtcatcaaagccccgcattacccagggatcggccctgtggatgagtctggaatccccacagccattaggacggtaagccacgcataccagcacatgtgtccctctgggtctgtgtttgagctccacaaaggatggattgtgcatagctctgtgcattcctagggtcttatagcataaagattgtcctcggagccttccgagctgccatgaataccacgctgtgtggcagagggctgggcggtgaagataatctcacagtctgttttctccatttaaatttaaaaccatgaaaatggaggagtttgttaactaataacactttgtttttaactttctatcaaagcaaggtgaagcctagagagagaaggaaggcggggtggggggagttactcctttcacagcccgcaattcccacatgcactgtaaaaagacaagtgatttgtttcttgaaatggatgtgagttaacaccacgggatgggaaactgtgaattgggacttgggaggcgagatgattggagtgaagggaagtaatgtcatgggagggaaaaagctgtcagagagagagagagagagagagagagagagagagagagagagagagaatatttgcgcatccctcccagctgggcctgctgagagctctctgtatgataagtgaaagtggaaagtggaaagcattgagggcattttttttaagtctttaaactctgccaaagcgttactcagtgcgctgccagggcagccctttctggggcagccctttctggcaacgctgctcacagcagcagagcctaggcaggcagctgtgtgctgaccaggtccacggcaagaggaggtctgtgagatcagagaaggaagacccgggaaggcaggatgagagccacagcgtctttgcaggtgaaggtggaggcgggggcttgagaggaggcagctccaactgcaaagaggttgcctctgcacccacataaagggccgaggtgctgccaagagtaggttttccttgaacggaaatgcaggggaccagaggcagtgaggaacctagaaaaagaatggtcagggtatcaggcaagaagcagtggtgagacaggaaacattttgaagaagttgtagaagtacgagggtttccttctgtctttgagtttgcaatcatcatgttttatatacagagttcagaattgattattcttggcattggtgttgtggttgaagccaaaaaaaaaaaaagtatatctgtatagcatgcatttgggatttagacttctcagattgataataatgttgaatgtaactaattataaagctcaaaaattttgtgttggaaatcatgatggtcatatttaagtgacagaaaaatcccagggcttgtgactaatatgctccgttttatgacagttgtatgtttctaatggcagtgttttgacatttgttttcccttcagaatttctgacttgaagtggctaagtttgaattttcccatggtaaatgaaggcatagtgactcagtcaggagtagtgttgtggattttgcctgttagcccttgagacacagtatgcacataggccattgctttctatgcagttacagtcggtttggtttggggtttttgttgttgttgttgttgttgttgttgtttttggtttgggttttttgtttttttttgttttttggggtttatttttagggtttttgtttgtttgtttgtttgtttgttttgtttttgtttttcgagacagggtttctctgtgtagccctggctgtcctggagctcattttgtagaccaggctggcctcgaactcagaaatccacctgcctctgcctcccgagtgctgggattaaaggcgtgtgccaccacgcccggctacaagtatgttttttaagttagtaaagaatatataaagataggcacattaatgtgactcactctttctaatgtacagacttctaatcggggatgttttacttgataaactgttgctttgttgggctttttaaggaaaaaaaatctaagatgttggaggtgcatgataaagcagttaataaaagtaatataaaatttatattatctgctgccaaatgatgagcaaccacatacatccactaaaagtgtgatgatagtctcccttataggaactgaaggtgaattattcgccactgcagaagggtccttataaggagccctctttttttttcctgtataacttgctcagacttttaaagctgcacaaagacaggaggggtcctgtctgtgtttactactcggtaggcttactaactacatatgcaaggatagatctgtgtttataaatgcctgccatccctgagccaagaatgtccgaggtcattttcttccctcattcgtgtagaaagtaaagattaccagactcaggtggcctcagcctcctgctcggtatggacattaaaagcgggactctctcactcaggcatgtcagggaatccgctcagataattaatggatgccatggtaacaggatattgtaaagtggtccagtgactgctaaaaacaagcaccggacaccctctacttttgacttctcatgaattcaaaatgcctttgaggatgtctcatctcctgtgacctgggatgtctgtcagccttttcctgtcatattcttaaaaacagcaacaaaattcctctagggctcagagcccatgagactgtgaataaagcctgactaagtggcatgcaagatttcatttttttttaagattcaaatagaacaactgtttggctgatttagagctagaaggggagagtagaataggattgttattgtcatatgtggagaaaacatatctggtttttttaagtgtctgcatgttaaataagtgtattatgccaatgtttcataactagaaggagatgaaaattggagccccttcctagagggccatgaatgacggctgtgtggtagagtcccagaggttagatagttcacgcaaaatgcttttggaggacacatctgaaagtaaatgtcccaaatagggacttctgcacttataacctcagcgtgagacataatgtgctccaaaatggccttgccgaaaggaaccaaagtgttcacagcatgtcttctagaaagcgacactgcatctgcatatcccagcgttaccagcttcagaagcgactctgccagccagccagccacttcctggcttctctgtgctcaccatataaagctagccagtggcgtaactgtgagatcctgcctgatataggccctatggcgagtgtagacaacagtgctgtctgtcacaatgcattgccgtagacagcgatgtatttccttattcggcgtccttgtccccattggctgtgtccaggtacagtgagaaactatttttatatgcagttgtatgtcactttgctgttgttgttgctctgctagcacaaaagtgtaaaagaggtgaagctcaacgaaagggaaacctgccttttaaaaaaaagaaaggtctcctaaagatatgtgtttaagtagtgtgtgtgtgtgtgtgtgtgtgtgtgtatttgtgtgtgtgtgtgtatttgtgtgtgcgcatgtatatgaacatgtgtacatgtgtgggtgggtgtgcatggagaggctagaagttgaaactgggtgtcttcttcaattcttgtcctggctttgtcaccaagcccagagctgcctctgcctcctcagtgctgagaagcccactgccgtgcctagctttctgcacaggtactagaaacaggagttgggttttcattcttgaatggcaggcaccttactgatgtaagccccctcgccagcccaccatgttccagtactgtgcacgaaccagcaaacggcagactcctgattctttgctggattactccccaccccagcccccagcatcagtttccataatctgcccattatttgattactgatgctctcaagctcccgttgttgaagaagcctacaatgcatatgtgactctcagcagaactgatgttctctggtaactgtcacaactgtctacttttcagaagtcaaaataaatttaaataccacttaacagtttctgggaggaaaaaaaaatgcaatgaccacatatacaaaagaaaaatcagaatataagatattgaacagtttctgctctcacaagtataaatcctacccaatgtttttcttaattagacattttcttcatttacttttcaaatgctatcctgaaagttccctatacccaccccaccctgatcccaaacccacccactcctgcttcctggccctagcattctcctgtactggggcatatgatcttcgtaagaccaaaggcctctcctcccaatgatgggactaggccatcttctgctacatatgcagctagagacatgagctctggggatactggttagttcatattgtagttcctcctatagggttgcagacccctttagctccttgggtactttctctagctccttcattgggggccctctgttccatccaatagatgactgtgagcatctacttctatatttgccaggcactggcatagcctcacaagagatagctatatcaaggtcctatcagcaaaatcttgctgacatatgcaatagtgtccgggtttggtggctgattatgggatggatccccaggtggggcagtctctggatggtccttccttccgtcttagctctgaactttgtctctgtaactccttccatgggtattttgttccccattctaagaaggaacgaagtatccacactttggtcgtccttcaatgaccttggaaaatctgatgctttcagtcgcctgtacacagaatagttaacttctgacccaactggctttgataaaattgaaatgaagatcttgccgagaagatggctgcactacaggaatgtgtgttttcacagactatagcatagagtcactcccaataagctagggttgctcagtatttcactccacagatgttggaactcccccactgattttatattttgagatttgttatagcggaaggactatcctgagccccttaacataccttgtaagaaataaggcagagagtaaaggagggggctgcccagtgtctacgtctggtttctacgtgttcatgtgacatgcgcacctgtatatatgtccacacccacgccccaaagaaaatattttaaaaatacacagttttctcagattcctatttctagacagaattaaatggtaactaacggctcaaagatctgaatgttgtttaatgattggacattaatttcctatttgtgctattacctattgcttctgtcattctgtcatactgaaccctggcacgagtgaggggtggctgttatcagagagtttatcatttaacaaggtgaaagctgtatgcacaccaaggtcttattaaggaagttttgaaggcctagctgctcttcagtatattctctatggctttgcattgtctgatacattcagtattttagtcatttaaccagtaaatgctaattttgtctttattgaagctgaccagaatatctatcccatgagtcaaaaatatccccttgtccaatttttcaatgtcttcatagagcactcaatacttaagaataacaataaggataatgaagtggatctgttaaatgcttgctggacaaacacaaatgaggacctgagttccatgcacagcgctcccttaaaaggccagacatggtgccacacacctgtaatcccagaactggaggaagaacggggctcagagggatccctggggctgcctagcttcacggataaagcccaggtcccagaaagagccccccatcaaaacaaaggattgctttagaggaacacctgaaatcagcctatgtctcacgcgcacacgcctgcacacacacacacacacacacacactctaataagctgagctagtgttgagtccctgtaattccagcacatgagagacatggaccgtgagttaaagactagttcaagatacatggagaagccctacttcagacacatttgcttaatcattatcaccatcatcctctgcatcatcatttttatcatcatcatcctcaaaattaaatactatctgatactaatcacacctgatttgaaaaaaataaaaccataatacagaacatttcaattcagtaaatatgggataccttactcacaaactgcacaagtaacagggtaaattgctgaaactggcatcaagtcacagcaggaatgcaagtctgctgtttgaaatgtccaatactagcaatgaacactttgcccaggattgttcctcagaagagctatatcaccatataacaggggttctgaagacaggtctgacccacaaggttaaagcctaccgtaaaggtttcacagagaagaggccatcccatgccgtgtggctgatgagtagcccagagcacaggctggcagttgggttatctcagcttactctttagctgaagaagtgggaaagatctgaacctttggtaatgtgcgtccatcattcagaatatgccccctaaagcccctgatgacttagagtgttaggcacactactctgggggcagtgagaattagagactcataatcatagcaagatgtctgccatttattttatagcagctgtgaaggttgagagagagaagtaagtggtcacagccagaatagccctttgcctaaacctaacagaacgagtttataatttttggatgctctctttaacagactgtcgacaggccaaaggactggtacaagacaatgttcaagcaaatccacatggtacacaagccgggtatgtcagtttttctgttatttgttttttatcaagtcctcatggattgaaggacacatgctcaacctttgtataaactctctccacacaaaacttcaagacccagcgtacttggtggcccgttcttttcagcgtctctcctgttcttaccctattcctccttcgtcgcaaacctgtgcctctgccttaaccacaagttgtcaagaaggacctaagagctgtccttggagcttgccaggtgtcctagtcttagctcacatctgcactcgggtattgttcatttctatatgcctgctgctcccctctgcccgtgtctgtgtcttacaagagtgaatgtaggtgggtcaggcttctgatcccactcagtacagttgacgagctaccttaaaagcacttaataaaataaattacaatgcagaggacacaagaagctgcctggggaactgagaacaagatactagttttgtatgtgtgacaagggtcgcaaggtacattactctatagaaaagatcgctctgcccagagagtgcaaatttggaaatgcaaatttgttgttatgtgctagaaaaaaaaaatgctttctgatcttctgctgtcttggcaacaaggcggcagcatctggattaccatgtttatgtttcattttctagatgaggacacagacatgtataatactccttacacatacaacgcaggtaggacggctttccctcgcttgcttgcgatgatgaccaatcacactccactgttgggaagagccttggccctttgtcttgccactcagaccccatgttgtcctttcctgtgatgagaggagaattccctactccctgtcccagagcatgcctaacaaaaagattgatcttttcttctggaagtgggaactaacacctctctgtgtcattcattctctcaacttcaggaatgttctgccacactgtgaagggtccggatgagaggacagactaggacctgggttacacaacaaaatataaatctttttatcagcagaaagagtgactaaggttgcataagacctctcagatattattcccgaaaaacaagtaaatccatgtattttacaaccatgcccagactcttgctccaacagggagccagtcactgaaagacatgaaaaccaccctcttagccttgtggtgtagctcagtggtagagcctttactttgaaaacctccctctgggctcagccacttttctgactcagagttgccagtgctcacaatgaaagaacttcagctctgccatttccgttcttatttgaatgtgcccatttcttgtggagtggtcttcatgctcatgtggcagtcccctaaaagatgccccctcccatcaggttttcctgaatatcatgtcaggagattctagacagccttagcataggcccagggttgtgccctaatttagggtcctctttgctaccctaacagaaatctccatgagattcttcctctctctaaatcctgatgaccagcaaccaactctttaactgggtgattttgctactcaactccaaagatatatgggggaggggggtaaacaaataaacaaataaacaaacaaatatcaagttcttgatctcccagatagactctatatccccatagtattacagaaagtccataaaataaatacttccttcctggccctcatccatcaagctcacctcattgagttacctcacaagctgaagtctgtagaacttaagaaacactgaagaacaaacaggtgttgtccaaagtcacatctcatggggaacacacatgcatagagaagcagtcctgcacagatagactcagcccaagattgagatgatgagaaactaagaactgttatatccttttaaatattgaaatcagtgtgtctccctggtaatgaataagctgaaattcagttatgttaccctgtaaagtctggggagttttatccttcagtccgtcaacaaaacaaacacctatgaccccctctctcaactttctactaacccatgactttgtgtcttgcatcatctccctgccatcttcttctatccatcaaagctcatcctttgggtctgtagtatattctcggtctcactcatgatcttctaacataactatcaccaactctttccaatcacagacctttttgtagcagcttgttgaggagggttcacactcccacgtcccatgcgggagcagtacctcatgcatacaagcatattcaatatttgttgggttgcaattaacctatcaatggtcataggtcaatattatgacatattagctgcctttttagtcttcctgtgtaagtttacctaaggtgttagtttctgtaactcagagcaaaccttgctaagtacccgtaagtctatttttactaaaacctgaattttcattaattctgcaatgactgatgattggctataatcaatacttaatgtgcaagacaaattgatgcctaattaataagtgataattcataaattaatattgataaattaatataccgcctaacgtgtatatgaaaatatgcttattgataatttttgcttagccattggtgatttttcagagcccaaccactaaatccacattttaagttatttgcctgttttgctggtttttctttttcatggtaggtctgtacaactcgccctacagtgctcagtcccacccggctgcgaagactcagacctacagacctctttcgaaaagccactcagacaatggcaccgatgcgtttaaggaggtgccctccccagtgcctcccccacacgtcccaccacgaccaagagatcagtcttcaacactaaagtaagcctccttccccaagcatagcttctcttaggatacaaactaacccaccacggtattcagtgactactcaaaccagcatcgtggaatgaatttatgcatggacttatcagtctagattgagtatcactacagagattatactgaatactttcagggaagtctgcattgtgctagcacaatgctctaaattaaacttgatgtatcagggacatcacctctgttttttgtttagtaagctcatataagaaataaagaggccacagatgtagttcataagtagggcatttatccgagtattacaaatgacaacaaaatacgtacatacacacatacatagccacacacacaaaataccttactacgttatatataggccttggatatgaggctcagtggtaaaaaaaaaaaaaaaaagctccacacattctggactctgggtccaattcctgagctgaagagggctagagtatgacacatcaccatgttatctcagtcttcatgaagctggggcatgagttccaagccactgagctacatagtaacttccaagccagaaaaggctacacagtaacactctgtctcaaacaaaatacatataaagatgaagttattggaaacaattggcacagatccgctctgctgccccaaattagaaagaggctaagcagttaatactttgttttcacaggtttgaaagttcaggtcttttaagatgccttttagaaactgagggaaattattcttaaattttaaattaggcattatttaacaagtgtctgtgactcattttcacctgttattttagctgattctaattttcatttctccactgaaatatttttaaataagctattcacactcaagtaaaatttttatgaatacatttcaattgtgttattttagcaggactgtggctaatatttctagttattggtaatcttgactgaaagctgatttttaaggcaagcatggggctaagcactttcattgtattacattgtttattctgataacaactcagcaggacatgttttacattacagaggaagaaatgggttagaaaattacaataacttgctcagtttgtgtgaatagagtatctaagccagtattcaaccttggtttctcctaggtccaaagcctatgctacctctagtggcaattaataaatagtaatggaaacgtttattattactggtttttaagtattttctaccatatatagtcttagttactattctgttgctatgaagaaacaccattaccaaagcaactcttaattacagttttatggcgagtagacagacaagatactgaagcagtagacaaaagctggtctgcaggcagcaagcagagaaacagacattgagcctgtcatggggttttgaaccttataggtttaacacacctcctccaataagactacacctccttatccttcccaaatagttccactaactggggaccaggcattcaaacatatgatcctatagaagccattctcatgcaaaccaccaaacacacctcataaaaagtatactcaataccactaaaattgtatcattaggaatagttgataatcatttataagatcatgatgtaatatataacaaaaataaacaccacgtcaaggaattgtcgtcttaatagctctttcctcatgacaaattgtatagacgtacaaatgtcttcaaactgagaaataattatcaccgcacatttttgtatgaattgcctccataatgctcagacaggacacagtattgtacaggtaggaaaagtgaaggaggaagctgtgtaggctctgctggatggagctcacggattctctaggcccctaagacttgtttctccttttctcttagagaaagtctgtgcctctctttccttggacaaagaatttcattcctttccgtgaaatcagaaattccaaactcaaaagacaaaagctcctttctctcaaatataaataaaataaataaatatatattgaataattcttccacttcttcaagttttctaatttggttgtggctgcctggtagagtttggtgttctgagtcctcctgtgaaaatgtacttgccaagagcccttgacagactcattggtatcaatgggaggaataggtcagattcccatgggagagtacttaaaggctcacacgaggggtttcccactccctctgcttattcctaagtatgtcagcccaagtgatgctgttgtaattcttactcatgaattccagtgctattcacaggaaacatggtcaagcatgctgtgtgcgttatttcttgtcacgctacaatcaaggaagccaggtcaccaggtggttaaaactggcaaagcttcacagagcatgctgccactttaaactcagacacacatgtcattaggtacccagggatctacaacaagtcactatccatgcgtctacaaacctcttttgtgagtttttgcagccatcgtcatgcttgtgaaggtagagtgaaggtgaactataaggagtagtttactctaaatcatttatataaaattaaacagatatagtaatttcatacatttttagccagagagctgttgtgtgaggagttttgttgttattattgttattgttttattttaatctctcagtgcttagcaagaaaagggcttattgattaagcctgaagatctgagctcgatccctagaacctaaggtggaaggaaagcattgatttccaacagcttttcttctgcatgcacacatgcacacatgcatgcatgcacgtacgcacacagatacactaagccagtacatttctggtaaaactaacgctgggaaattgaccatggtgtatctcacagggctttcaatgtgggttgccattccttttcaggcatgactgggaccctccagacagaaaggtggacaccaggaaatttcgatcggagccaaggagtatttttgaatatgagcctgggaagtcgtccattctgcagcacgaaagacccgtaagcccttgtcattgatccaaaagccagcttgctaggccacagggtccccaagcaaacctgaatctcatcccatttatttgacattgtcaagaaatgttgtttatttttagccatgtcttgtgtatcttgtttcagaattgaaagaggtactttaatagcagatagatagatagatagatagatagatagatagatagatagatagatagatagatagatagatacagagatgcaagtatgcaagtctcattatcattagctatagctggctgtgcctaatcataacactcatacatgaaatgcttaattgctaatctatcttgccagtgagaaaaatcccgagtccgtgtccccgatgtacagacccaggcagatgcatcccttgacttctatgttggtttcctactatttagctcaccaaagaagaaattttccccagcacacttcccataacaagttgtttaattggtttttattaagtccctctcaggttaccaagcctcaagcttcctgattgataccactttaatggactgagattgtattgttctttatagtctttttttgtttgtttgttttagtgacacacaaactaaacagggtatgggcttagaaaaggccatttgcctccattaagctaacaggagcgtcttccttggccctcgttcttatttgcttcccttgtttctttctcagagatcagtgtcctcaagacctctttaaaactctgcagctcctctgtatgtccgaacttgattccagataaaacctgttgctgttttccctgtgagtgtctccagctcacacgtcagcatcacactagtgcagcgactgcaaagtcggccctgagaatgagttggacggccttgaccacgagtaacattgattcagagtagggaaccctgtgtttgcggctctgttctgcagcatgttccaagatcttccaatcacatagttcaactgccttccttcaaggaactcagatttcgttgcatgataaggttgccacagagagactgagaatgaggggggaacattgctgatcccagatctagattataacccattttgtaagttgtctgtctgaatatcaagaaagtgaaactgccgaaccaaaattcaatggaatacaatattactcctgaaaaaaaattagattaaattataatagaaatctaatgatttatgaggctcttgggattatggtatgactaaagagaagaaatgtcttaaatggccaaaatggaaacacacctaaagaattctccttgttagagatcattatgggatcccctcgttgtggctgatattttcacgagcctttgggcgcaagcttggaaggttctctgttttaaaccactagtaacaatgacagcagtaacagcagatgggaatacctactctatgccaggctctatagttagtaacaatgttttcatcttgtggagtcttcccaacagccctataaagcagatgtacaaacttcccactttacagatcaggagatggaagcagcattcaccaaatgccacatggccacgtagctagcgcgtgctcgatcccattgagcagaggcaaatgtttgcttggtgtacttctgcactaccacatcatctcctctgagcaggaagtctttagctactagtactctccataatgtacttggttggtttcaagtatagtataattagtggctaacttataataagttcatgttactttctttaccagaaagctgggtgcagggtaactataatgccagacgagtattcttgactagtctcagaggaccgagaggtcagaagccatgggcgtgggcagagattctgctatgggtaaacctcttcagccacaggaaaagatgaatgggaggaactggtaacttggaaggaaatgagaacacaggcatacatttttatccttcctgaaccattttgttgggagccagagcaaatgataggagagagtcaatgatataattttgaccaaaccttgttaaatcattgttattgagagacaattaccttttaaaagtcaatcctgaatttatacctctttggattggaacaaaacaaacaaacaaacgcaaacaaaccaaagagctagttgggaaagatctagttgggaaggatgtttgaggccagctaagcgccttgaagtctcagactgtaggagagagagggtttgctaacggagagctagttgggaaagatctagttgggaaagatctagttgggaaggatgtttgaggccagctaagcaccttgaaggctcagactgtaggagaaagagtgggtttgctaaccgggaggacataatggtgcatgaatctcaaggccttatgactgcatgtcttctgactttttacccaggtattttgagagcatccctttgttctcttcggttctaatttttgaaaatgatagacaaagcgctcagcagtcctatgctgttctcccccatctccagcaaccctgtcagcttcctgacattctcggatgcccctcactctctatgaacttaacattcctattgacaaggagaaatgtcacggctcttccggtccacagttgtcctttgtctcggttgacgtggcccactcacttcccagattagcaaatccaatcatctgttttgctttctttaaaaaaaaaaaaaaaaaagcctgctactcctacattttctcttgattttttcctgtccctggagcagaacctaactgccttgatccaatttacaaaaactaaaaaccaacaacaaataaaacctacccaaattctgtcacttcactcacccctaccatctatacaaagggctttcagggctttggtcttttctttcttcggggaagcactccataagaccttctcctggaaggtttctcttccccactcctcagctttatcagaggcacacttggcctaggggcttgttcaccctcagcagcgggtttgtagcccttcttgctggatacctgcagttcccactttgacatccttaccactcacctgtccacctctctgggttcctcactacacgtgaggctccctgaaagcgggcaaccttgactgacagagcatcctctatcttccatacccaactcaatgcctggcatgtggtacctatgcagtaactaactccttgtgtgactaagtgaatggaactgatgttacctttgcagtggatggataaaacacatggccagagattgagtctatctaggaggcccagtgggtctccatcaagacccacagatggaattcacaaataactctagctcagcgtctaagagggagcggttctgtttaagcagaaatcctcatatcctggcgatggggagggaaggatattaccttcatccttagcaattgaagccacatctacctatttatacactttaccagggagacaaaaaaggaaattcatttctttgaatttttaattcaaatatttataatcaaatcaaatatttatttgattataaatttcagtgctgactaaatgggcctaatgtctgatccaggagaggccttgtgatcaccagaaatttgtgttaaatgatttgatccaccgattagaccacatttccagtttacagactccatatgacaatcatagcaacttcactgggataatattaataaaggcataactgatcatctaaattggatacacttgtaaatcagccatgttaattgcctttatgcttaataaaatttaaaaaaagaatccactaaggcattgttacctttgatacagtaactgtgcttacatctaataatagccaaaaggaacacaaccggatgagttgaaaaggcaatttaaaccaccagagactatgggctcatcaagagaaatcactactcacagttaaagctataaaaatctgggaaggtatagctgatggtttgacccatgaagaattatcccatcatgcaatagtactttctggggaaaacaaacagaagcctatcaacccatgccttgaagcttgaaagccaatgagcatttatgagaacaaactcaggtcctccagtgtgtttagggtaacccagaaagcgtgtgcccagcaaaaggcttttacgttggggaaacattaaaaaccatgcggtctagggagctttcgagagcaatcacatgtgagccctggtgttagtgtatcttaagcacttctcacgctggaggtggatggtctgtgtgagtgaaaggttgctaggtttgtgaactgacagaaataaaacagagcgagagagacattccatccatcggaagctgctctcccgccattgcgggaattacactgagaggtagctgttccctggtggattcccatgaagaggagtttctctggtgtgagggaggagagggaatgcggacagagatcctacgcctgtgcttccgttatctgacagtctgcatatgtgtcgctgattgtggcagtagttctggatcctttagaaatagttctggattgctacgggatgcattcaattattgtataactaaaagaattcatctagacagtttactggcatctccttttggggggagtctggccttttggggggtgtctatttgttggggattatcttgcttgatattgtttgttttatgttcttttgagataagcccaggctgatttcaaactcaccatcctcttcccgctagctcctaagtacctgcaattcaagtgtgcaccagcatgcccagccgataaagcaaaggctctgctcgaatgcgtacaactcacagcattgcagaattgctaaggatgacctgttgctatctaggggactttctgtgcgactatctgtttgcacagattttaccaggttgctcactgtgactatagactgaagctttaatacacagagccctttctatcctttctatttattgaaatcgctagtttcaaatttggagcaggatgatagctatctcctcctttccgcagattctacagaaatgtatctccaccaaggagaatatgggctgtcgatttgtcattgatttcctttaagtcaagttgactttaaaaagcttgtctatttgtttagtaagtttgctgccccctagtgttctgttcatgtgttttgaagcaactctttccccttctaagaatggttctcaaattcctcatgatgtggtgacccctaaccataaaatttttttcgttgctaatttataactgtaattttgctacttctatgaatcctaatgtaaatatcagtgttttccactggtctcaggagacccacaggttgagaaccactgctctgacaaattcctatcttccctcagcaaaatcaaacactccagatgggtgtaggtcatcccaacagtagctgaaagcaaaactttaaaaagtgaccattcatagacactaaacatccagcaatggaaactatggagtttggaagaatttgagggttgtcttctgttaaggagatagtatagctgtctgaactacacaaaggttagccaccagtcctctctgctgttaactgttcaaagataaaagcacctatgaagtaattatacactacagctggcattgtctaaacaattggagaaaagtaacatttcatcactaacaaaatcttaacattcctataactagtgaatcaaaatttttaattcggtggaaagcatgtgtttcttttaagcctgtgaaaattggttactggcaggtgttctctttaacagatctcactgttaattttgaaaccaaaagtaaccttgacatagattagggtaaatatctcagagcttccgcagaacatgtgctctcgttctgattgaatggccgcttcaactgttagtgatggaaaaaacaaacaaacaaacaaacaaaacctcatagccaaagactaaacactaaaagtaatagtaaatgctacaaggccacttgcagcgctcaaccaacagtgtcacattttgcatacacataaattcctgtatgtgtccatccagacacccgcttgggatgtcatcaaccagggtacaagcatgccactatgaagtgttattcgctcaccattggtcacaagcaactcccagggttattctgcagtctttataatcaccaccattaactctatcattgtaatgtcagtgaaacactataatagtatgtgatggtatgtaatagcatgtaatgaatgatatgtaatagtatgtaatagatgatgaaacagtacaatatttcactactactaagcccatgacaaaatagcctattttttttaatgtggtaaatatcaacggccccagcattacagggttacagagcaactcagtaggaatccttgagccccttaagaattctaggggaataatatgggattgaaggggtgggtgtttagcagccctcccagatggtactgtggacttcacggcttttctcttggttggcatgaatggcttttagggaaccaagtaactttccttagaattttttctgacttaatatattatataacacaactatatacatttcattagggacatcagatatatcaaagaagtagctagggacacattcagtaccttgagcatcattttatagaaaagcaaccaccatgagagcatctagcctggtgggtatcataataaaaaaaacaaaaaacaaaaacattaaaggttaatgttaactccattaaggaaaggctgtgtctacgttctattgctaaagtaattgtgtttgtttttctcaactgtttatgttaacaacccaagcatttctgtcttaaacttgacactcataaaccactcaggccagtcagtcacaccccataccctccctcccttacccactatgctaagcctaatttacccacacccttctttagctccaagtcaacggaaagactgaatcacaaaatgggatattcttcactattagagagacttgagaccttcagatctttgctatggtgggccattcataagaaatctgctctccgcagtcacccaggccatagcccggtcctgaaatgttagtctccaggactgacatcagctggtaccctccaggttccatcaagagcccctgttctaacgaaccagtgtttcctcaccccctctctcttacagccccctctcccaccaactccgacacctgttcccagggaacccagccggaagcctctctcagtgtcaccctcaacagatggcctgcgtagcccttcccctccgcccaggagctgtgtccccgcaccccgtccgagtgccccagatctctctcccacccgggtgagcgccttccttcttcacctttctctcatgcagtggggaagctgagctcagtgtttgttctgaggctaaggcaaggtcacacccctgtcccagctggggttctttctgctcctagaccctacttctctccctcccagacaccctcatctccatcattccatgctccagcctgtcccatctgcaatgtctgcacaatgcagaccactgctgccactgccggggacttccgggatagcagaatgagcagtccaagagagccctttagtgccttgactggacgtatcttcacaaaccgatgtgttaccatccccattatcacggccaggataacttccctagttcatgcatcaggctaaagaactagcaatggtggcaatagggagcccagagatgtcacgaccctcatttgcatatcctccttgtacttcatttcctcccttctgtcctgccgaggtttgctggatgagtccgatgcatgtttgcgtgtggatgcgtgtgagttttcataccacatggcattttccctcacttcgctcagtgtgtcttttcctcccctcttttccttcacatctgctctagacgggtcgcataaatccagctgacatagatttagaaaatgaaccctggtataaattcttttcagaactggagtttggacacccggtaagtgaggctagacaattactgtaagacaaataggcgaatgttgtttgattttttttaaagcatattaattgtcacaagggagacggtgtcgtgtcgaagatagaagctggatgagttatagacatgtgttccagctttgtgcaaattcgctttggtaacaaatgcctaaatgtgttcattggcttccaatatatttttttttcctgaatcatgtattagaatcacatctaattaattacaaatctagcctgctggggtagtttgtcttggaatatttaggtcatcagcacagctttagggaagaattgtatttgtacagcacgtttggggctagtttaacaagtaccggtgctgtctgtaagagtgactatagttcttgttgcccgagaaattatcatgcccctgcagagggcttggaaccccaactcagtgacttgatcttcctgatgcaactgctaccatgaaaaaaacagaccagaaaggtcaaaggatttgcccaaaatagtcactaattaaacctaagcctgtcacacaacaatgacaacctttgagcagtgtctctatcatgtactaccagaccattctcacagtaagacgattctttgaatgggagagagagagaatgaagaagccctgcttggactctgcttcgtagtgttttcctcatgagcagccagcaggtctctgatccctagagtcgaattcagaaagcccacagtttggaccttgtgggatctaattgatcagtttgggactgggtcaattcaggttccaagtaactttcccttagtctgtcaagctctctcggggaactgtctgtgacatgcattttacaccccctaaactgttagctagcatgtcacttattagcaatattattagaactcagagtctgttctttcttataaccatgtcatataaggatttataaatatgcagatcacctattccttactggatggctgtgtgagccccttttatattttaaaatgcagccgtggttagcctcattatatgttttactgaactgtgtcaaatgtgactgtaaatgaatataaaacaaagtttcctgacatttctactacctgatgaaaggattgtttcctcctgggttttttttttttctgacatctccttttattattataaatgtattttatttcattgggaaaatgctctcctgttttgctttatatatttgctattgctgggtagtttctggagactgtgcaaatttctgtgttgagcccaaattaccagcactttccgtgatccccctcagccacgcaggctctctcaccagcatgctctcccttactcctccaacatttcctcaatagaccttgcaatctgctatggccaaagactgggagtggtgatttcgatttgacgaattgagcttacaaatctactaactgcacacaggcagctctgcgctgtgcttgagaatatttaccagcgctgcactcccgctccccggccgccattttgctccgtccctgtcactctatgtgtacccgatgctgtcggcactcaggttctaactgttgtcacctttcccacatgtgcattactcgctgcattgactctcctccatcccatctctccacctctgcttctgtggtgcatctacacccagcctcctaaaaaggctctggattatgttcaagatcattcttccggtgtgtccaacgaggtaaagacaaattcttctctcctttccaggctccccccttgttactgtcaacctgaccatctgtgttgttatagttcactgtgctgttccaactggttttgaaaacactctttgtatcactgtgttgcatgtagtagcattatctaggcagaacaaaggggttggctatttctgaattctaggtgataaatcttccaactgttgctttgagttaaaacactcagcagaatgaaaattaaaaaaaataattttggcaatatattaactacccattttatatattaactactaattcctctaaaccaagcaaagtactactacaggaccactttttcattgtgcttagagattagattcttggagatggctcattaggttaaagtattcattgtgaaaacccaatggcctgactaccatttttgcaacctacccactgtggatgaaaagcatccctcacatgttgtggcaagtgtgttatatacagtcagacagtgatagatagatagatagatagatagatagatagatagatagatagatagatagatagatagatagatcaaagtttagatttctctccatggtcagatatttattgcttatattttcctaaatgttattgttgttccttagttttcctaaatgcttgtaacttgtggatttgaacattggtcaagaatagagatgatggatacccgacgtgtgtgctccagtttcccacttccacacccttaacgggcatcactaatctttcttggctttacagtccaggtagccattacagcagataggcatcactgcatcccgagataaaacttggttgagatctcagcggaaggacgcttatgagtagggctggagagatgacttggttgtgaagaacacttgctattcttgcccaagacctgcctttgtttcccatcacctaggtgcagctcacaaccatccacaattccatttccaacacactctcatggcctccaccagcactaggcacatacatggtgcacagacatgcatgcgggcaaaacactcatgaactagaaataagaaaaatgtacatgacagtcagccaaccagccacatgaattttcacccggataaggaaaagactgtattaaaagtaataggaagggtcctaagccaaactttgccctctacaaagaaaccagaagattattttgaaaagcacttagaagacataagcagaaatgtcattgtcctgcttgctctcttggcctgtaaaggcctcccacaggtcagatgctctcagaagcagccaagatagaagtgcatagaaccaactgattttgtcacaatggttgctgtgtgttcttcagtgaatgcaacaattaataccttacttcattgcaaagcccgtattcaagctacgcgtaagagaagagccaagagctcgtgctaagggtggttgtcctgattcagtggggaggacagattgtaggcatggagttgaaaggagaaatattcaaatttccaaaaattcaaactgcagttaaaattatagatcatgtaataagcatcacggtgtatgttaaaacagagaagtagctgggggaaaaaaatcaaataaaaagccaaatccagtaaccagaaactttgtgcagtattgagttcagtaattttcaagtagttttgtagcaaggtctactctctaaaaagaattaaatcaaacaagccattctattctgtacgttttgttatcgtttcagcgtatgaacaacctaagaatttattttgaaatttaattttgtcaaaaattatgttttccacaccaaaactctgttgctgtgttgaatgactatcattagatttataatccagtcgggcaaagggatatctttatcatcttgagtatatctttccttttttaagttcagtatgatgtatttaaatgaattagtcagcattttataaaaaagaaaaacaaatatgtatatttttttcctcgggtatttttagcaggtgtttctggatttttgaaagtagttggttcattgagaactggaacaggatttagacatcatttttaattcactgtttgttcggatttttaactaagaaaagtggaatggaataactttaaggaatgtatctacacttgcctcctaagatggctgctgagagaacaagtcgctaattgctcggccttcatttcagagctatttcctttgaaccacacattttgccatccccagtagatgtgtttaaagctcagcaattctagaaacaattttattttaattattgagtttgtataaaatggattctggaaattaacactacacaatataattactgagggcagagatggggaaaacttaacaaagcactttctatgttaaggtaggagccagaacacgacattaataaaaagcagtttaaaagcagttaagatatgtgtttgtatcttgagacataggagtgactttaatagcatgttaactagggtgctaacttaagaacgtagccttccagagtgtaagaagaaagacacccataggtatttagaatatgtatttttaaatatttgtatgagattgctatcaaaaagtgtaaattactaggtaatacctaagctataatttatcaagtacctgattttatcaaatttatactatgaatgacatttttaaatcaaatgtaactgagacatttgtttgcaaatatcagaatgaaacccatatgttgctaatttgaaacacttcttaaagatgagttaagaacatgtttgcagaatgtaatcaataattacctagcagaaatggtgatttaatgtctgccagtccttgaaatgcccttctatcatgttaaaacagccatcctatgcaaatgagggatagatggcgttgggtaaaatggtctagttcttttctggggactcttttctttttcaggtggagtgttataataatcgtacaaggtttcaccttaagtattaatctatttttattattcctttataattggcaactgaactttctctcacaatacaaagtcaaagcctggctttctgagcccgcgagatggctcagctctgacctgactttaatatccagaatccatattgtgtaagaagaaaaatgatttcttcagattgtcttctgacctccacacacatagcatagtacacatataccatggttcacacacagacacatacacacacacaaactgtgcttttaaaaatccttttaaactggtattatcttgtttgcaatatattaaaaaaaaaaaaaaaaccagaacaaggaagaatcattacagtttgtcttaactctgaaattctatcaattctcatacagtgttttattttgtactataatagtgtctatgtctatcatcattgcgggttcatatttctgatcttcctaggaatattctaagagcatctggcatctgaatttgacccttttagtggtcaactgtgtgtcaggttgtcccataaaacctgtgacctgcagatggcactgctctgacactcactccctaatgccatttctgcaaacatgcagaattacctaacatgattttacttgttacagttcttccatattatgctttccttactttcttgtatccaattcacacaaataatcatgtaaacgtatgaacatagcagagcctctttcttttcctatatacgctgagaacatagcaatctcagaattttctaagaggtacaaatattaactattcttaatatgtctagagaaaagaagaaatagattcatgccaatagatatttttgtttgattatgggtaagattccattctcaatcagtaatatataattaaagtaaactttaggtctaaggcttgtcagactgatctacataagaatcataaagccacagcccagtgctttgatgggaaactcacagtatttgccagttagtgggaaagaatagtagaaattacttacagtgaggtctttatttcatctaaataggtttttatattctgataaaatatttctacatatagaaatttaagataaattcaaattgctcaagatttatgaacccgtaccaggctgaagtctcaggtaatttagggtgattacagatgaaattctgtgagctttatgaagatgtcatgacatatgcctttagaggaagggcttaccaagctcggcttgtatactatattttcaagataacaccggcactaacaaggaaactataaagcactttatgatttataaggattcaaagtgaactccaattattgtcttacacaaaataaaatccagtccttcatgtaagaagctcctacttagcagttgctgagagcctgaagttaaagctgaaggcacctttgcccttccctcagtcctgtgttcctgctgataatgttgctgttttgttttttgtttgttttgttttgttttcttcctgatgaaatgtatgtcttagaagttgtgttacatcacagaatgcagtgtgttctattaaaagagaactcggacgtggtatctctttggaaagacattttcataatcacaatgaatgattcttttaactgcaatattttagagtattccttttagaatgcaaaactcaatggtgacaaatcagtgaaatttgctatggtaattcttttcatgggacgactcctctgtgttaccaggtctccatctatcagtcctccatagacagaagcctggaaagacccagcaggtaaggatctggtgatatcatactaaccgaatattctgtgccagcaattgctttttcaatagtcaccttccctgctgaaatactcatttcattaaaaaatcatttaagtcgcattcttattttaagtaccaagcctcatggtgtgtattcaatcacttgtaaatgcttttcttaaatgataccctactcaaaactatgatcaaaaaaaaaactccctttctttataaaccatcaacgccattttccacaactatgtgaaaggaatttttaacagtttacttgccgattctattttttttaatcactcatgatttaaatagacaatatgggaattcttctgaacacattaggaaagaaaaagagaatccttaaggtaaaaaagacttcttttgctagatggcttccttttatatggtcctttcttctattttggcactttctttttagatagattcatgttgtcagaactatttcttatatattaaaaaaattgattcaaatagaaatcataacactgaattctcaagaacagtaagtttactgcacagaaatttgtactttaaggggtgattataaacacacacacagagagagagagagagagagagagagagagagagagagagagagatccaacctgcatttgtatgtttgcagcaattctttcaaaattgccaagtcctagagtccatgaagatgttattagatgttatttcttaggtaagtgggcgagtaaagaaactgtagcacaccaggtggtgatggtgcatgcctttaatcccagcacttgggaggcaggaggatttctgagtttgaggccagcctggtctacaaagtgagtttcaggacagccagggctatacacagaaaccatgtctcaggaaaaaaaaaaaaaaaaaaaagaatctgtggcccatctatataatagaatattgttcatcaataaaaagatataagctatcaagagaccaaagggcacagataaagctggagacacaataaacttggtagagtgtttacctagcatgtgtgaaacccttggttcagtcctcaaggccacaataaaaactacacatggtgacacagacctgtgatctcaccacgtgataagtagacagtcggaaattcgaggtcatcttcagcctcatgtccagatgacatgagatgctttaacaaagtaaaaaatttaaacagtgtttgttttctttgatgtgtgtatgcctgagtgcatgtgtgtgcatcagttgcatgcaggtatctgtgaaggcagggagagggcattagagcccaaggaactggagttgcaaatagttgtgataaaatgtataaacacctgccaagtgtgggtgctggaacagccatctcttcagccccacaaaataatttagtttttaaaggacatggataaaaaaattactacagagaagaaaccaacctgaaaggattgcatattgtggttccaactatgtagcatttagagaagggggcttctctatgatcttttaggaaacataaagagaaaagggacagattagaaaagggtacccaagggatcttttgtgagagtaaaagtctgctactaggcacattcataatagacatacctcatcacacattataaatccctaaggatggcatgaacctgatatgtcaacgacagactttgagagatggcatgtctagatagggccactagctgttacaagtgtccatagaagatgacaagaaggagaagaaggaggaggaggaggaagaggaagaggaagaggaagaagaagaggaagaagaagaagaagaagaggaggaggaggaggaggaagaggaagaagaggaagaagaggaagaagaggaagaagaggaagaagaggaagaagaggaagaagaggaagaagaggaagaagaggaagaagaagaagaagaagaagaagaagaagaagaagaagaagaagaagaagaagaagaagaagaagaagaagaagaagcagcttaaaagaaaggggagggtacagaggagtgctctgctcagttgtctttgatctctgcagaggattggttcctaggactcaccaaggattctaaaatctaccacctctgaaaggcatgatacttatagagaacctaatcatagcctcctctatactctgaaatgcgtataatgcctcatgcaacacagatgctattaaaaagggatattgggactagagagagggctctggatgagagcccttgctgctcatgcgaaggttcccagcccccacatgacggttcacagccatctgtaactcttgctccctcagatcctctgccctctcctgagctccacggacaccaggtactaagtgtagtacacggatatctatgcaagcaaaaccctcataacacataaaataaagatgagtaaaacttaaacaagtggctgttatcatggatcacttgtggaaataatagcacaactttgtatatgttcagcagcaatccaacccatgatattccctgtgcatagttggtttaatccatggttataaagagtcagagagtctggagcttgaaacttccctttaaaaatgagatccgtgcatttctaaaaggccgctcctacagaatgtattctgaatgtggaagaatccatttctcactatgcagctttgtgagtgcgaggttaggtgctatgtcattgtctgatgtgatcgtcagttttcttgtgcatgtgttaacctcttccaaagccaaccaaactgactgcatctgttatcagctctgcaagcatggccggtgactttaggaaacggaggaagagcgaacctgcagtgggcccactccggggcttgggggatcagagttcaagcaggaccagccctggccgggcggacctcccaggatcaagttccacctttacgaagtctttcattagctcttctccttcctctccctcgagagcacaaggtgagtaatgataaatgaacatagcttgctagttcacagtttagcccagagtgtggggacaggccaatcctgtaaccatggcctgtgctgtccttacttgtagtgtcctgaagcacatacagtttcccagcaaagcattgcttctactcagtctactacaaactggtgagccacttgagtgtcttaaagaactcagatcaagccatacagtagtagtgaatgcttttaattccagcactcgggaggcagagacaggtagacctctgttagttggaggccagcatggtctacagagtgagttccaggatagccaaggctattcagagaaaccctgtctggaaaaaaaaaaaggactcagactagcatgttactatttttctcaaaaacagagtagttattattattttctttaaaaccccaaagtattaaacaatatgttgtcataattacagaaatagcaattacaggcttttccatacttacatattctaatgttattataaataattaattaatttgtagaataagaattaaaaagagcaacagaaaaatatggcctaagacatgcaatgggacgctttaattctggatgaaaaagctatctgtttaagtcatgcctttagtcatttactctatctcgttccaccttcacttgtatgatagagcatcacgttctcccatgtaacacggtggtccacaatggattaccataataagtacatataggcttaaagccacaagttcaaaacttagaatgagcggccatgaaccatgagatggctcactgggtaagggcactcgccaccaagcctgaccacctgagtatgatcatgactcttgataaaagagagaacagacactcccacctccacacacacattgtcttctgacttccacgtgcatgtaacatacataagagagaagaaaaaacaagggagggagggaggaaggaagaaagaaagaaagaaggaaggctagctactttttcagatggcctgtctctgctttgaaaatacagtagtaacctacacattgaaaggacacagtggctcatttgggtctctggtaaacaacttcggtccttttaatttcttttgaaccataatctattgatccaggagcatgccaaatttggggtccctccagtgtccaggagttgaaacagaacagaatgggttttaaatgcctgtaaagaaaatgagttgtaagggaagtgtctgtgaaggtgggcagagtcaggttcacataacaactgttgcactaaaactgttgccatgcactggttaaagggaaacagtagctggtgtgtgtgcaaaagacactgtttatgatgactggtctctgtgtgggtaagcagctggcctatctaagacctaactaactttcagaaagtgatttcttcattaactaacacaccttcgttatattctgctcagccatgccagcaaataccctaaataacaagtcagtcatgaaatgttgtggattcatctttctcagataaaatccaaaatgtaaaagaatccggttaattttaagtatttttcttaaatcaacttcctttcccaagcattacacattaactgaatgaattgacaatttggaaagatcataagatcataatttttacattgttgagagagagagagagagagagagagagagagagagagagagagagagagagagcgagcgtattatagatagagttatggtttggacatggcttgctggctaaaagacaattgaattgtgcaatagaaatgtgttagctataccaagtgcatttcatgtgtgattgtgttcactgtaatgtctacagagttgcactgaaaaatattatcttgcttccctctgaaattaaagctatgtgtgttaaggtggcctatattaaacccacactaactgccttctctttgctgtgctaatattgacatgctctcctttctctgcgaaccttttaacttctccaaatgtctttctcctgccatgccgctctggactgaaaggtggggatgatagcaaaatgtgtccgcccctttgcagttactcggggctcaatggcaccccctctggtgagttagagtgctgcaacgcttacagacaacatttggacgtccccggggactcgcaaagggccatcactttcaagaatggctggcaaatggcccggcaaaatgcagagatctggagtagcactgaagagaccgtttcccccaaaatcaaatcacgtagctgcgatgatctcctgaatgacgactgcgacagcttcccagaccctaaaaccaagtcagagagtatgggttctctgttatgtgaagaagactccaaagagagctgccccatgacatgggcgtccccctacatccaggaagtgtgcgggaacagcagatctaggctcaaacacaggtcagcccataatgccccaggcttcctcaaaatgtacaagaaaatgcatcgcatcaaccgcaaggacttgatgaattcagaggtcatttgctcggtgaaatccaggatcctgcagtacgagaaggagcaacagcacagggggctgctgcacggatggagccagtcttccaccgaggaggtgcccagggacgtggtgcccactcgcatttcggaatttgaaaagctgattcagaagtcgaagtctatgcccaatctaggagatgaaatgttatctcctataaccctagaacccccacaaaatggtttgtgtcccaagaggcgattttctatcgagtctctgctggaggaagaaactcaggttcgtcacccttctcagggtcagcgaagctgcaagtctaacaccctggtgcccatccacatcgaggtcaccagcgacgagcaacctagaacacacatggagttttccgacagtgaccaagatggggttgtgtccgaccacagcgactacgttcacgtcgaagggtcgtccttttgtagtgaaagtgactttgaccacttttcattcacatcctctgaaagcttctacggatcgagccatcaccaccaccatcaccatcaccatcaccgacacctcatcagctcctgcaaaggccgatgcccggcttcttacactcgatttaccacaatgctaaaacatgaaagagctaagcatgaaaacatggaccgacccagaaggcaagaaatggatcctggcctgtctaagcttgcatttctagtcagccctgtgcctttccgaaggaaaaaaatcctgactccccaaaaacagactgaaaaggcaaaatgcaaagcctcagtagttgaagctctggactctgccctgaaagacatttgcgaccaaataaaagccgaaaagcggaggggaagcttgccagacaacagcatcctgcacaggcttatcagtgaactgctgccacagattcctgaaaggaattcatctcttcatgctctcaaaaggagccccatgcaccagcctttccacccactgcctccagatggtgctagtcattgtcccctgtaccaaaatgattgtgggagaatgcctcacagtgcctctttccctgacgtggacacaaccagcaactaccacgcacaggactatgggagtgcactgagcctccaaggtggatgctctttcctttctttgtctcacgtggcacagatcccatcctttctcgtattcgtttttttcccatcctgcatctcatcactcttgagccgtgagaccacgtgacgtcattatgtgttgccaaggaaagagctgtgtggtgcggcgtgtttgactacgtagttctcatttgcctgtgtgctatttgacattcatgtgttggctgaaagtactcatcaattcacaaacatttactcacttaaaactaaaagaaaacgcaaatttgtcacttaataaaaacaagtcggatgttgtttaaaaaaaaaaaaaagaaagaaagaaaaagaaaagaaatgataaatctccacattcttaaaggctatatttacttatactaatgctatacagcatgcttcacaaacagtagatccaaatgttttttaaaaagcaggctatataactggaaagcttcaaatcaagacattgattcaaatccagaaaccaattttctagcaaaataacccattttctttggctatctaatatcctaaaataatcacctctcaaattcaaaaggctaaatcaagacaaaaactataattcaatatatgtatccctaagatatatttagattcattatgaaccaaagccagtggtttcatggacttttcttagatttttatattaaccttagaacactatacttattcacgcaaagaagttggtccccacaaattgtttactaactccctccatttaaagggcacaatttgaaaaataaataaagggcacaatttggatggaattttgtaaatgtatcttttagatatagatatgacttctatcattcaaggatctcattttcttctttctattacttgatatacacacttgctatttctgttaggataaacttgtactgaaatgtgaattggattatgctaaacatgactcttgaataagtccatttcacagttaacacaaatgttagaaggcaaatgacagttctaaccagaggtatttactgaagttaacataactttataacagcatgctttggtgcttttagctacttcccaagtgaatctgtgtaggacagacatgtcatgaggctggagtaaatattccagacttgggagtgggctgtcagtagcgaggctttagacactagctctgcagagagctttagctagatgcattgtccaactgaaaccaacatgagtcaatggatttgtattattataaatgcatttgtattattataatataatattattatattgagaaattgaaggacaaagaggataaagtttctcaatataacacagattacagtaacagcaagagaagtcaaagccctgttaactaaaaatatacagcataaaatataatttctaatggcaaaaaaccacaaaattgttactaacgactggacaattttacttattggtatttaccttcactttaatttgtactgtacaacatgctggaaaacaataaattagaataaaaggggatgaggtgatggctcagtagttaacagtcattgcttatctaccagaggacccgggttcagttcccagtgtgcacatggcaactcacaatggtccatatctccaaacccagggaaagactgccatcaaagacactgcacacacatggtgcacagacatacatgcaggcaaaaacccatacacaaaaataatgtcatataaaaaggatagaacagatagaataatgatttaataatattaatagtatactttttaatttacttgataaataaaataaatttcgaattcaaaaacttagatagacactttctatttaaactgaaacaagttgtaatccaattttttaactaccttcttcagttttctgataccctgatatatagtatatagtacattatcaaaacatgagtttaaatcacttaaaaatatactatatacacaaataaaaattatcttgatggtttgtagtattcaacatatttatatttgttagagtgagtaaatattttcctaaactttgacccagttacacaggtaaaattctatgatgatgctggatacttttatacctttagtatcatcctgcatgcaaatcacacaactatgttaggtttaagaaactgaaagggagatttgcagttgtcatttttaaatgtaactatttataatttgttttagtgagaaaaaggcctcagtatttcataagcaatttggcaacttcatatgaagctttctggttatccttttgctttctggaataaatattttaccctctgattagttgaacattcacgtacaaagaaaagtcataaaaggtatggaatcttaaggctcagtaagtatttacaaacagtaataacacacattcatgcatacacatatctgtgcactcttacatgcatgcgtacatacactcacacatgcacacacatacatgtatgcacatgtacatgcacacatgtgtgcacacgcatacatacacatactcacacaggcacacatatacatgtacacacgtgtacaaacatacatgcttgcatacacacatacatacatgaacacacatacacatgcacacagacacaagcacccacactacacacacacacatgcatgcacgcacaggcgcacacacactcacacacatgcatgcactgggtagggtatgactatagtcctatcatgttcatattttatctttcttcttatcatcacttctgagattgtatttcacaaacatctgtttctagaaatgtgtaacttttaaattttccattctttctgaatcttatagtaataattatatattggaaccaaaaataatagaaatattaatcatgataaatttggagcatgaaaatcccagtaactaggaatcatctacaccaaggattgcagtgtaattaattgtcaatattttatatatgattagaatatttgttgtttgtgtatttcttcattttcaacatgtgtgtgtgagtgtgtgtcttacatcattactttacagttacttatgagttttacatccatgttctcatcaacaacatgtctccaaatttgagggtaaaataattgccacaagggcaagtggctagccagtgtcctttcaacgaagcacaatctcactctggctcctctcatcctttccaacagatcacgagtcccctagaagttactcatctactctgactgacttgggcagaagtgcatcacgggaacgaaggggaactccagaaaaagaggtggttagttgaacagtattggactgtttttaaaggaccttctgtgaaagcacttgccagtcagatatgtaactcaaatcagtcaatagttgagaccaaaaccaggcagccacaagagtctgtaaacagactgcttagaggctgagtctaaggcctatgttctactcatttcttctttggaatgcactttgggcagtgagccctttctgagtcttaacctggtactcaggaacccatagagttctaattgccctgctttgtggttgggtgggggtaggtgggggtaggtgggtgggtgggtgtgatctgtacaagtacttttgttggagaatacttctaaaaatagatacagattttgatcaatcaagttcttgtagcactgagaagctctcatacagcagtgactcccgctctatcatccttaaaccagaactggaacgcctgttcccaactgccttggaagccacgagcactttgactgacagcttctaagatagcctgtgggacccttataaagtcagaagttgcccaagttgtgttaatgctcaccagaatcacaagggaagaaaaatggggtgaaggaattactgatgtcactagctacatagtatgttatgcctcaagtaaattcatgggctcaagagtttgagggcaggcatgggtattacttcatgactaaaagatgagacaaaggatttctcaactctctattcctatattttttgctaacctcttgataactaggctacttcttggatagtcagtatttagtgacgaatatgataacttcctttatgtcttttgtttcttttcttatgactcagacagactagtgtcaatccaaagaagttagagcagctagccctctacaactgtctgtttatagttttcaaaaagggcacacataggacagacgacttcatgggcattttgttgtattatggcattgatctactttagttctaaagcgaagcctgatgatgaaatcagctatgcccccatttagctcactgctctgttgtttgttttgttgtttttgttgttgtttttgtttttgtttttttggtaacttgcacatattacttagattacatgtgttttatagcccttgcgtgaaatcttacaattttttaaattggtgcaaaacgtttaaccttccctttcagaaattgcctgcaaaagctgtctatgatttcaaagctcagacatctaagtaagtggaataaaaaatcactatgtgtttgaacctcattttcactattgttatgaggtgtgtgtgtgtgaatgagtgtgttacaaataagactcaactctgaattccataacccactctaatcagctaatcagctagctcctttagaattactaacggacaggataatttattttcaagttcagctgtgaatcgccacgtcttaagtcttaaaccccatcagttacatgagtgacacacaatgaatgcagaagggcttcacggggagatgagaagcgtattttttctagaaatgtttctgtcaagaattgaggttttttttaaagtgatacagagtagttatccctacctagcgagggaacttgagagcatttgtatgtctagctacatcgagggcagttagtggcatgaacaagaacacctacgcacagaggaccctgcagagaaagctgcatcttacagcactcagcgtttagagattcctaggaaaaacccagtcctgccctgtctgtggtgtgtgttggtgttttcatagtcctgtgttgctttcctgtttctttaggaacttcttcatccaaaagacaaggcaggtaaatgaatgaggttaatacgaagcacacagtagagatctatataggagaggactgtctccatcaaaagtatgccaccctcccaatcaccagaaattcttccatggattcacctcaaagttcccatcacaacctcatagcactgcttagctagggccttggtgaagcatttgagagacaaactacaccgtaaaaaattattgtgtttcctctgtagtccaggcatgctattgacactttgtaaggtgttgtgaaaaaattatataaggtatatctattttatttgtactttgtgacaagccatcaaattctttcctgagtatgtactacagcagactatataacagaggaagggtgtgtgcctagggctcaaaatgtgttccaggtatactagaagctatacaggaagttaagagggaaagagaaaggcaagatgagaaaagttaaaatggaaggcgtgagggttgatttgatcagaacacattacattgtatacatgtataaaattctcaaacaataagttgaaaactaagtctaagcatgaaaaaaatctacaagactcagagccagtgagatggctcagggggtagggactcttgacatcaagcctgacaacttgatcctttctttctatataatggaagggaagagccaatatctatgagatgtcttctgctctccatacgtggtgttgtgtgggtacccacgggcgtgcacacacacagacacacacacaaataaatgtaaaataagtaacaaaaaatgtaaacaagcttcaaagagaagatggcacacatcacagaggacagggtcaggaatacgactggaccactgcatttaaattgtcccatgtgccaagcccctcaccctattcatggaccccatccttctctggaggtccctgatggagagtcagggaatcttgctctcccacgttgccatggtactgcctgcctgtaccatcctaattttcacagagtgcgtgtgtgtgtgtgtgtgtgtgtgtgtgtgtgtgtatctaaactaatacaatctgcatgagcttttgtaaagtgtattcaccagccacccatcaaagccaagaagaaagtgagccactcatcctatgaataggtttgtcttagtatagcttaatgatcctcctcttgttcttttctcagaagaaataaagctataaaaagaacatctgtcacctccaatgtgattctatattgtgtaacttccaaggctcataaacccaaccatctttgaaaactgcagaagaagccaattttagtcattttaaattagatgtgaatgcttttttgtatgtaatatgaacaacacacacgtatatgtgttttaaataagtattcatttaaagttatttttattattcaacaagctcaactgtaatttaaaaaagtctcaattgtagataggagaaagaagagatgacgtctcatttcacatagggtccacaatagcctgcattttaaaatacaataaaaatacagcaaattatcaaaatgggactctagctctggcatgagagatggagttttgaaaactggagaataaggcagcttcccttatactgaatatatccagaattttaaatgaatatagaattttaatatattcagtagaaagaatctatattcatattagaagaaaaaaattacttgcctataattcccatgtatattctaaacttttaagaaggtgatgtttagaaatacccccagtacaggccaaattattaggttataaacattaatatgactatatactagcaaggtgacaataatctgtcccctctttcaaattgcatatcactgcagaatatgatttacatagggtgtgaactatatacttgttcttcaaaatcatttccgagatcacattaagtaacttgttgaaactcataaagaaaccctcatctaactgagcttagcagatgtttctcagataaataaaaaatatggatcataacactaactgctattcattcagaaagagtccagtaaccatgatcatgtctcctccagggagctgtcatttaagaaaggagacactgtctacatcctcaggaaaattgaccaaaactggtatgagggggaacaccacggcagagtgggcattttcccaatctcatacgtagaggtatgtcctttctccttatctcctggcggatgctgtcccaaaggttgtcatgagtttacaaaactaacagttgttctcttttacagaaactaacacccccggaaaaagcgcagcccgcaagaccaccacccccagtccagcccggagagattggagaagccatagccaagtacaacttcaatgcagacacaaatgtggaactctccctgcgaaaggtaacctagctgtgctctttcttggtcggggtatttttggtgactgtgccattctgaagccgggctaggttaccttcttttctagaacattcaggtcttctttagcttctacaaaagattcaaggctgtccagggtcactgttccctgtgaccctgctccgtgaaactgagttctgagagtctatctgtggcttagcctgagaattgtgaccctgagtctcctccagttggtgcctctactggatactaggaagcgcatctgtggaaccctgagaggagagtgaattttatttacaacgtttcaaaatatctttatactcattactcattactcaactttatcttggaattaaggaatgaatggtcctaatgtaatgaaaatatatcctctctagaagcctttttgaagagctattatgcaatcctgtttccttgatcattctttgctaagccttgtgatggacccaaatatctccagcaagctatccaatgcaagtcatttgtctgaaaacaaaaatcaaaaggaattccttaatttcctttcttgcacaggtcaggatactaaatgaatttgctaaacaatggcatgtatacatttgaggcaaccgggtctccacacagcacagaaaatatggtagtgttaattggggtgatctagtatacgctgtgcctgtggatagttggtaaagtgagggcggctcagagatgcaggaggcggtctagttctctccttccaccccaagttctgcatcatcagcaattctctcttacttttcttgtgcactacttaacccagaaacccacatagcactgcacagggtagcgtcttctgggtcatactttaggaatggtcattgtgtgagataccccaggaaagcctatcagctgcctgttctgggtacatgagaaaaccggtgcaatttagggagattcccttttctttgatatgttctgcctggtgatgaggcggcacatttaacaaaccatgcagcactttgagttaaagagagccttccctggaagggggtccctgcatagaaatgtctactatggcaaaagccaaagatgctactcaaacgcttagtgggcagagtgacacttggaagggatgctggtatcaaactgtcctaatcagaccagggggacattagccctctccatggctatggataatcttgggtgccacactctgtcacctctcaggacatgcagcgtacggaaggaaaacagcatgccatccaacattgtgccttccagaagatggcatttgtgacccatttcagacagtttcttcctcctgcatgtcctcacaatgattctagtggagatcagatgatgttcctgtcattgattgggcacctttcatactgtttgccttttgaaatgacttccacaagttgttttactttgaacctgcataaaacagacataagcccattcccatcaaccgagcatccttaggactgtaacgtcatgaatggaaggttagcttacatctgtgctgacaatctatgcttttctaataaacactgcaaccttgctcactttcttccgatcaagcaaaaacctgaggtataaaacttttccaaatagaaaactaccactttatcagaaaacaaacacagttacattttttttatatatcattgtggtctctacttacaatgcatttttcccaatgctcattccagggcgacaggattattcttcttaaaagagttgaccaaaactggtacgaaggtaaaatcccaggaaccaacagacaaggcatcttccccgtgtcctatgtcgaggttgtcaagaggaacgcaaaaggtgctgaggactacccagaccctcctctgccccacagctactccagtgacagaatttacaccctaagctccaataaggtaagaagccattccctcctgctacctccgtacttgggatctcagaatgtgataatcagtaggccacttgggggatatcagaccatcatacctactgaaaagaaacaaattcatatgttcctgtacatgacttgcgggttagaaaatatgttagctttgctcaagtagatgctggtgtaaaaacttagagttcctttttgttaattctgttttcaagttatagtctataaagagagagaaaatgttagtaccatcaacctttcttgacacatctcagtatttctgtgtatataaatcacacacatagagatatatacacacatatatagtatatctaatcattatatttactaggtatataatattctacgaaaggcttaaggtattttcttcatagatagtctaaggtattatatttaatttagggcctataattccattattagtttaaatgttataattagaaatactcagttttttattatttggggggccacaaatcccactatttcacctaagctggtagctgaagatgaccgattatctttctcaatacaatctagaaaggacttcccatcctgaattggtccattagaccaaggctatcatccaacttcccttatctcccaaatttttccttcacttttctgttgaattataagattccttgtgggtgtagatagggttttctttctcctttacaattattttaaaatataaacatgtaaagcaccagtgaaattatttctaaaacattgtcaaacgcctcccagtgatgaaagttatgtatccggttgtaggttatgttaattgatgagctcagggcaaggataacagaccattaacactgtgaaaatgtgaagtcaaggttagtttcagacagtgtccccaggagcctaaaccatcctacttaagtaaataacctataaacctatctcaattaagatgttttcctttaaaaggcctaaggtttggcattttattaattctaatgactaggttttagtcatgggtaattaccataaattctcttcccctgaataactgagcagtttgcgccagtttgattatggagtttccagaattttacatttagagactgatatccctccttcattattcttttgataatagaaaaagaatcttcatccattcatatgtattttgcctaccatccatctatcttaagagaactctcagatgaccctcaagtgattgaacttttaaataaatgtatgcaggagagaaaagcatgcatctataaatgctttcttggcgttgaagcacttctctcatatgctctacttaacgatggcaagctaatattttaaatcagtgttttgtcttttcctgaatatgttttaaatggcatccatggcttgtgttataatactgcattttacacagaagaatgtacaaataccaaatttttaattttaatagaggattgttcaagtttcatgagtaaccaattgtcttgttcttactggaaaaaaaaaaccctatgtcaatttaaaagaaattctagtttcatttcaactggctatctatcctattatgccattagcttaatgaaggaaatccctgtagtgttgtgctggtcaatttcaggaaaaaagaatatgtatttttaaatagtgaaagatacaaaattagaaaaaagatgggctttctattttctaattggtatttacaaatagagaaatgaatacattataacttttgaatcattctttggcaaattcaaatcacatagcttgatgtatttctattttgagaaaggctcaaatatgttatttcttattttggtaaaacagaatccattgtaatcttttttaaatatgaaataactttaactttgtactatgttttgtgatatgggcactccttaatcaaaattagcatttaatattagtattatcaagtctgttttaaagtttttgctcttttagccctttaacaggaataaaggtgacatggggacagtaacagtgaagtcagcagtagcagatcgcagtagatactacagttgtaatgaccatggtgaaatttagagatttcccatgcacataatatttctgtccacatgagagaaaaaaaataaaagtattcatcttgagttattatcaatttcacttactcccaaaatctaatcactaagatcaaccctaacacttctgtgtttgtatccagaagtataaaattgaactttagccagtaagagaactaatagactatcagatgagacttcatcttaggaccaaagaggctgtcaacccatcacaaaatgtgtacagtatgacgtcatttcagtggctcggcagacttgggtcccggaggaagatgctcacacagctgtgttatacttggtgccattcgtgacaccccatgatgagattccatcacatttcctttaaaacgtagataagttccactggtgccccaccctactaaaggacactttaagtcaactgttcagtgggaaatactgtgcacttggacagagcaaagctcgaggcttccctgggctacatgtgtaaagtattatcctaaacagtctagcagaatatgcatctccagaaaccttttctgaaagacttttcttcacaaaccaaagtcaagtatctagaaagcactaacttaaaggccaccttgccagcctcttccacagcccttggatgcacagtatgtaaaatttgcttttccccgtatggtgagggaagagcagtgtatacatgttactaggcaggctctttacaagtacgtcttttgaatttgcacctgttttacttaaaacatccacactatatcagtaatattaaaatataaagcacgatattttgacttcccaagacagcttcatgaattagattccttgggcttctctaaactatcacacttagcagatggccctgcacaggcatctgtctgcttcggtgtgaacatctactttggaggtgtttgaaactttgaagcagtgattacacgagattggtctcattcggatcctggacctctatggttaagaactatattttagcatttattcccttaagcatatgttcctttttactaagtctaaaatgctgtatgcctcataaatggggcaactgtgaaaactcaggagtggggagggaaaacggtcaatcaaatcagagaataaaacaaagctgagttattcactatccccagctatacttgcagtatagacaagagtccgcatcgtctcagggaagtggattgatagcaagccttttagggtttcattgcctgccctcctgatgcctgtgaagctcactctagcttcccttttgatgctggtatcttccagaactaagagtgttttgttgctcgcagaaagttttacagttagcctaaatgattttatgtgtttaagtttcgaataacttctccccatctagaaatcttccaactgtcttccatctatgtctgtgttacagcctaaaattatattcatcactgtacctctgtcatggcattttcatgtgttgttatcttctttgttttacttcataactcctgatcatttgtaagttggcttccagtgaacatgcctgtcttcccatgtacaatgctatgcctggcccagaggaaagagccatccagggaactgcccaagggtggctatccctgacagactggtgtccaccagcgaacccattggctccaacaccgtcatctttcctcgacaacttcttgattgaattagagaagtttagtgctttaaccttaccatctgaccaggccaaaccgaacattctaaaccaagtcatccctgaagttaaggaggagccctctcctctccctctctcactgcctccagcctctgtaccagtcaaatcaccttgctgtctgtcaccttctccccactcaagttccacttcaaccgagacccagacaaccaacacagagtctcttcaggatcacacaaaggatactcaaagcaagttggtagatttgaataaaaagaaaagaggttttgcagaccctaccaagatccttgaagccctaggtgataaatttgtggcctctgcatgcaccaatgtgggtgccttgcctgtaattcttcctgtcattggagaggaagatgaggacagctatgaggggcttgcataccaaaaatggctgccaggatctcaagaacaagatgtcacgtggtatgaccccagcagtacagaggtgacaccacaactgcacatcaaggaggaagaggaggaggaggaggaggacccagactgtttaacgtattcactaggcattccctcacatcctaggagccccaaggaagacatcaatgcagccaaaaccagtaacgaggtatctaatgttgcctagatactggggactaatcagtaatacaattattcagaagagttaataatattactaaatacctacttctgacactgccttggtaggtttcattatgaggagtgtaagtattggaaattccggggtggaaggatatgcaagcatgatatagtttattaaaatgataggaataccccactctcccattacccctttctcactataaatccaacttttatacacttaagtttattgcctttctaatattctaatgttattaatgatagctaatcattagctcatagtctcagacactgttctcacaacccaaacatctttaggaaacatggtcatccttgcattagagatgcagaagcagataggtagacaggcttgtctaattccaggatgaaccaagagtgcccctcgacgtgaaggcagagtctgcagaacagaacaacaaagtaaagagggtaaaatgtcaaaaagtaaatagttctcccatccctgtctgactcttctgggagagttgttctcccagctgcttgtagtctgggtcctgcacctttgtcctacaaaggaccttgacaagtagtttccatcaatgtaggaagagaaggacctgaactgtaagtccatgaacttcttctctctttaaaaataaacttcattatctaaatccaatagcaagtatgattatctataaattatgaaattagtaaatcaaaaaataaagtttgtatcacattaagtaatcgtgatattacacaggtcattttcttctgtgattcctctgtccctaaataactagacatgactggagaaaagaaacccacagcttagtgacacataaaaaaattcactgtaataagccaaggatgcaactaaatatcttacttaaacatcagattttcccttcaatattaccatcttgaaggtgtgattagaccttcattaggataggttttgtttacaggatgtgctatccgcttgtttcagacaggatcttaggcatagcatctatccttctaaggttagcaagcatctctgtgctccaggaagtcccaacttccctagctatgtgactatttaccttatgttagccttccttgatagcaagttatatgtcattgcagagttttaggtactttactgccttcatgttgaggggaaaaaaatgccctcacagacagactagtagaacccaaccacctacattccccaaatcctttccattaagattttgagatcaaaatttaaagcgcttttcgaagcaaaaatccataaatatcacttttcccgggatattttacaacttttaagttattagatgtgataggccccttcatctggacatgagcataatcacaccttgtctttcctcaacattgaagccaccttcatttgcttcgggagatcgagctgctacgcctgtccccagctgtctgttcccttcccctccaactccttctcctctggcctctgtctctgacctggtctgtgagctttttcagccgacccagtccccctcacctcctctcctccccaaatacccttatcaacaggagacacagtcaccaaaatcaaaggtaattgcatcttgagtgtggtccaacttactgcatgtctctccgtgatgttcaggaggggtgtgcatttggatttcctgccgccttacaacatctaaaaagttatggaaattgtgactgctaacttttaacatcatcagcatggcctccatccaacaattcaagagtcaaatctgcgtagcaaccgtacccatattgagaagggaaacaaactaaaacttacctcataacccaaggtaaccattagattgtgttttaacacaattattggagctatcacattcaaaggcataagtttagtgcctgccagcttgagtcattcctcagtagacacgatgccttccacagtgcctaagatcagagtggtccttggaactacttgtctagacccccactctttcataggatacaccaaggatgatctttggtgttgactacggagcatctatctctgatacttgaagtccaggagcccagttggcacttaagtctttccctaggattactacttttttgtacattaatgattgctcttggaaagcaataatgatagttcaagatgaaaacagaaaacaatattaacaatccaacatgaaatctctctatcacagaaaatatttgattctagagtgagcctgaccccaaatcctttttcttagacttcaaataaaaattcatccccaaatttcatcttctgaatgtaaaacaaagatctctctagatctctgtagatcaggaaggaactaaggctgtaacgcaaccatgtttccatagcagtgatcacccaccacaaatccccatcgccattggacagcatacctgtctacatatgaaaagagatcttgggaagaaagaataacctaactctaaggaccaatttttctccactcttagagtcttcatctgagctagcaaatgataatttagaacttctaagagctacaatgcttagatcatgtctactcaaggctaagaagtaccttttagcatgctctctgtggtttgatttccagagtgaacattttactctttgcttcctgtaacattcattagcttggatgcttaatcagtacatgagaaagtgcctctagatcaacagctctcaacctccctaatactgcaaccctttagtacagttcttcatgttgcggtgccctccaatcataaaattaccttccttgctacttcataactgcaattttgctagttatgaatcttaatatagataacttttggagatagaaggttgtcaagggggttgtgacctacaggttgagaaccaccatccgagtcacttacttctctgacttagatgttgaattcatcattatagtaataagggaaaagctaaagtgtaaaatgttttatctctatcacgagcgccaagaatatttctcataatcttttgggatcaatgtatcaaaaataataagggagagtgaggtattcacagtaacgatatttgaaaatactgttttaataagtatatgaaattactaatttcaggaaaacaaacttttgtctcttgtattttacctcatgttcgggaacaaatgctgaacattaattccccattgagttttctaaaccatgtaaagtctattttatactcataagaagaaggataaactcataagaagaaaactgaacacgtttctgtttgtaaatataaaaaaaattattcagtcccagatctcatgttaattacaaggaaagaaagcactgacacaaaagaaaaataatattttaatagtcatagaacagtgtagttagaaatactgttcactatactaacatttttgttaacccatatcaaccattctttaactcacatgaaagaaggagggaagaagaaagggagagggagagaggggggagggagtaggagaggggacaacatcatggtagttccacagacatcagacctggacaatctcagaacttgctgtttcttctttcagaaaatgtcacatgaacacacacagcagggaacaaggaagcttaggaacagtggtctaccctcagtgaccatgtgcttgagtggagacaaaaccaggactggatagtggagagcatccaatatcctcttccataagcaagcatccaatatcctcttctaggacatgcatgacaagaatgtatcatcccaagagactagagaccacaacctgtcatggtcatgaaatttagcctaacctagagctacaatctttaacttaaacgttagtcttactgatgttctcttaattctagtcaaattccagatcctgcatttccagctgcctgccacagaaagaaaaaaaaaaaaaaaagcaaattcgtgtcaagacttgcttgttcactgccatagtgagggcctttctttgaaagaatgccaaaagaagccgtggtcaggccatactcgatgtttggttatatttttctacctctcactctacccacacctccctacaaaaatgtcattttcttcttaggagcattgctaggacatttatgtctaaaactactaacgctttttataaagcttggtaggcattcagccaaagtttctcttgcctcaccttgtttattattgcccaccatttggttaaaagcagagaaacatggcagagtgctttgtgcagttgtgaagccttctcctaggaaggaggtaatactcttagccacacaaattacatttctcctgccagcttcgctttccaaactgtgtcttcactgtgcgtcccccctaccgtagaagctgctgatcccggaagggtgaaagccaagccgtacagagcagacagagaagctgcgagacgcctgttcaccctcccctgttcagctaatatttaagcatggcatgctgtgtgtgtgcagaaaaccggaaaccaagaaggttcctcccaaaggccacggaatgaagacgagagctaacccacttcttatggcttttctaggctgacttaaaaggcaagacatctgtcctgggtaagccgcctcggagcccagtgatgtctaagaggtcgtgcggctctcctgtcagcggttcccacagggtagggtcggacatcccctacctgctgcagccatcctggccaccctggctcctccttaggtgactttgctgtgatcgtgcagtaaggcgaggctgaggagtccctggaaatcaagtgaccagtggttgaggagctaggaagtcagatctgaatgggccgtacactgccttgttgtggcgcgcctcttgtgtaaagggcgcgcctcaaacactaaactactcaaacaagagcacagcgtgcattgttttctacatctgttttccttccataatcaattgctggtttccagtcactatttttagtacagagaactaagctatggccagtcatatgccaagctcacctgcttccggtgatgctaactcttagtgccttttggtttctatggatttattttaaactgtcagccatttcaaaatattccattgctcaggagacacatgctactttttcaccacgttgctccctgtgatactgctctctgggcatctgtgcattcccaatccccttctatctttgaggtcagttgcttctccttcaactatgcagttttgtaacatctgcagaacttggacggattctaaatggcaccctgagttctggggaatgaagccaaggaatgtggggtttttcatctatgcagactccagggttcctttcaccatatctaagttaatgggccctgatttagctttggctggcctgccacacagctctgcatttcaaggtcttggagcttaatttttagtgttcccattctatttcataagtacaagtcgtgtttcacacgtaaggcattctgtgccttttgctttgcagagtcagatctgcttccattgttgacgcagactcgtattgccataggggaggagggagtgtcagtttgtagagattaatctctactgacagccttccagagctaacacaaatactcacaggaggcgataagagacagacagacagacagacagacagacagacagacagtaagttaattttataaaacttaacagaactcattcataatttcccatgggttagtaagatgccttgctttgagtcgccctgaggtttttttccttgcctatatttccattttataagtttgtgtactacttaaatgtctgagggccagaagattctcctttattttaatatgtgttccacgttcctaatctaagagagaaaagaggccggccagtaagtgatttttgtttgttagctgagtcacagccctctatttctggctgacacacactacagctagcatttgctgagaaagaaagtcttgggaacccaagagctccagagaccttgtccacaatggtttttaaagtagcatccataccttttagagaatcatctaacctaccgctgatcctcctggggtggcttgagggaggcataagtaaatacttggctttcaaacttctagctgcaatagtgcatgttgtctgctaatcccagattataggataaacctcaaagaagcttcataaatttttataactgatcatatatatatatacatatatatattggtttttcgagacagggtttctctgtgtagccttggctgtcctggaactcactctgtagacctggctggcctcaaactcagaaatccacctgcctctgcctcccaagtgctgggattaaagacatgcgccaccacacccggctttgatcctttatattaatcttaattactgatcctggctttgcacagtaccatgtgtttaaaacctgcctcttttgtatccatttctatatcatttttaaaaaaggaaaactcaaaggatgtaatatgtacttatgaaaatctctggatgaaaccattgctttcatatagttcatccccatggtaacgttgaggagggaagacagacattaaatatttagggctctgtgaggcatcattgggctttcaaatctttgttgaactcgaaaaccttatcaagagaatataaccatagctaaattcttgcttaaaatgtctcacatggtaatggcaacctcttaacttgaaagctgctttctcaagctcacagtttgcataagcctctccaaatattataagtatatagcactctataaagatctcagcacactgagatgctatgcatgatagaaatgcctgagcagttaaaatagaactcaaccttaaacagtgcaggctaacaagtcatttcttctcaagaattgagactgcagaaaaggaagagcgtggccagcaaaacagatcattattacttccaattatcttgtaggcttcagaacatcctttcaaaaaaatcaatctaggcccaagggatttaatccctgttaacaaaaggcgcaacttttacatgttactaccactgaccaccactaggtggcgatggggtgcacaaactgtagcaaagatggtatttggaagcactttgcttgaataacccacaggaaacccaaaacacagatgctgagtttaaccaaatcaatccatctagtccgtcataatacgtcattcaacagagggccaatcaaaatcgtccttccatctctttttgtcatttaatgaagggcaaaatgtctttagatgtacgtctgtgtaactaacacccacagtgaagttgaactattacctctggggttttcactgtatagcatgtaagattaaggagaggaatctgtatatggcaaaagaaaactatgaggtgaattatctattcctttatgggctccacagggggaagaggcttcttatcctgtttgtctccctgatcttaggctgaggcatctaagctgcatgaccaaggtcgatagcagacagtgccccacacagacacaaatgcacatccataagtgaccgtcaacactacaatccctctcctcgccaaggacccgtaaactatattaactctaatgccggaatgggcaagtttccttagaaacagatcagtagttatccattcatctgaggaagattcctatccaagaaactctttgaaatgtcacaaaagtcacaattgaatgagatagcgcaaacccttcatattacagggtggaaattgctggcacacacccaggaattacgtgagccccacacaaagagcccagctttcctaactgtcaaaaagacagtgtacttaaataattagggaggttggaggatcaaaggctgtgagcaagtaaaagtctaatgataatactaaataccggactatcacccccaaatctccttactaacaggttgatacagttgttaacttcaaaaggaattagaaaagaactggaagggtaatgtgtacattatgggtgacttgcacttgtttctctgtgtattacattaattaatgattccttaaattaaaagtctcaaaaatgtctagaggaaggtccctcttatgtagccctgtaggccggccttgagctcactgagatctgcctccagagtgctgagattaaaggcatgcaccaccatacacagcttagtcttcattatccttgaaaataatatcatttatgcattcgatattttatatttaataatatcgtttgtaaatttaaatactgttttataggagtaaagcatctatggggctgggaattcctatccattcttcagttttaaatttatgtattccatcatagatattgaaaaaaattacaggaatactactttaaaatgttcccaattaataggcttacagcagtgaacttaatttgcactaagttaatgatgtgggttaggaaatgacggttgaatttcgaaaggggtctgttcacagtctcatactgactgcaaccccagggctctctacccacccttggaccagaggtgtctatggacagtgtcagggtaaatccgtctagtttatgatgatcaatagtaatgatgtgtatccaagcactggtcctggtacctgaagacgtggccctagtgactaattgcattattattagcttctaggctctgcgtttgttatcttagcaggtagctgtcatttagcagaacaatatttgaaatgtgaatgggtcatatgtatctctttccctgaaacatagcatatgggtggttgatgtaaaatacactgagcttccatattcaacaaacatgttcaattgcattctctgaagtatttgtgtggctatacaggatgctaaggctcgtcatttccaatattataagtatctattacagatactggtcttgatgcttagtttaaaaagaaaggaaactcttttgagagttcagtgcactggggattcctaccaatatttctcttcgaaggtaaagcattatatgttacctggatcttgtccgtttgcattcttcttaaagttctctgtgttccctttggaaaactgcatgtgcttccctgacccggccctcacccggttgcgagcggagagtttaaattcgcatccagcatgggatgtctggctcttgactttttcatctgtaccgtacgtggcaatgtcttccgtgaagggaaaggctgggagcgagtgtggttccggctgggcgtgacttccctctgcttgtctgagaaagcgctggagagtgaggttgaatggtgtccagcctccccgctcctgtggtttttgttcttgctcttgccatattcctgaccttggaaaaatcaatgagactaaatgtcaacttcccccaaagcttgaggagaccagattgtgctcaaaagtttgaacctcgggtattttgactttaagcacccttcaaaatacttgaattactaagcatacagaaaccctttatttggtggactttttttttcttcctcttggttttttacaacaggaaatattaaatgtcaagaaaaaaaagtaccatgctattacccaaattgcctttttaatgataccagttcaaacattgatgacattgaaaatcatttcgtttcagccacagcgtcctgggttctctcatgaaaacattcaaggtgggggagaaccgtaagtattcttcttatcttctaaatgaaaggctaacctcgagccacaaggtgggcaatacaggcaccacatagatacagaggatagtaggactttgcaagtgatggggatcaaatagcaaacatggggtctccagtacaagagatcacattgttctgctttgtcaatgagatcagatgctaaggtttaagggaaaacagaagggctggtgggataactcaatggttacgagaactggctgctcttccaaaggacctaggttcaattcccagcatccacaaggtggctcataaccatctgtcactccagttccagagggtccaacaccctctcctagcttccatgggtaccaggcactcaagtggtacaaatacaaacatgtgagcaaaacaagtatatacatacaattaaaatataaataagtaatagaagaaaacagaaaatgatttgtacacggaggaaatcatacaatgttctactgactcctacacatttagaaatctgccttttccttggctggctgtgtaactggtaaccacaactttgtttcacctttgaatacttcaaaagtatacttaaggtataattccaaaattataacatgtgctttaaaatgtcttttgaaaaaaaatagcagtattaaagcactcactactgttcaaatgtatgatacaatctccatgcacagcaagaatgtgccttttcaaatgttccccccaaatctcctctcctttctgacacatacattaaaccaacctgcaagtaccagccattgtctttcagagtttcatttgtctttctatggcccagtttacagtagcgactcagataaatagagacaaaagggcacttcgcttcctatggacccctgcctgtgctgagtgaaaaggacacctccagaagccacaccatggtcctcagccttgccccgtacacctcagcactctgcccaagctctgctcactagtaaaaaaccatgctgaccaaagatgactttttgtgggcaggccctggtacagaactggtgttttctgcaccaaaagtcttggttcttcatggttgaaaaggcgccttttggacctcaccactattttctgaaagtgcctctcccccactctggctggaaaagtgttcttctgaagtccccaccacaaccagactaggtgaaaagcaagggtcactgaaaaacttcacttaactgcaaaactttaagaacacttctcaataatgtttctgctgttcttttaagtgtgccaacaatgagaggattgaggcacaacactacaccccgtttgtaacattcttgttacaaaatagatgtctagggtgaccgcattttgttagcatgctctattaaacagctttccagatgtatgaaaattgtgttctgttgaactttgttgtgtgtatgcagctgtggcatgtggctgttctaaaatcacagagcccacaggtggagaaaactacactttaaagcattgctttcgccgttattctttatcaaatttatgttccattgcagccttaatcagagggattatgaaatgttagctaattgcatatcttttaaaaacatatgtattttctgaagcaaaagtagaaacctaagccatgttgttatggtccagttttattgtccagggacaataaaaggtttgggttatagagaaattgacaaatttatttttgaggcagtcttgatccaccccctgccaccacctccatcttaccaacatctttcaaagcagtactgttgttattttaattgggctgcatttcctgtgtgcagcactgattttgaaaaccagcagaggtagaagaatttccaggaaggtttgtttatgtttccataaaaacttgtgagggtgcgtatgtgtgtgtgtgtgtgtgcgtgtgtgtgtgtgtgtgtgtgtgtgtgtgtgtgtgtgtgggtgtgtgtgatctaattaaaccgctatggtaaataaattctgacaagcatatttggctttcatcatataaaaatgagctgggaatccatgccaaggatggtttgttagttctggggacctcgagacttctcaggcagctgcagtttgtagccttaaataggcctgtaagtggttggaactcggcctcggcctcagtaaggctagagagtaagaaactgaaggagagagaatcactttctcaaagtgactatggaatatatccattgacataccagccagggacaacaaccatgtcacacctcaagtttgagattggacaagggaccttgctgacagcccccttccctgtgaacatcccaaattacatcattctatcacctgaccagcctcagatgaacacgtgaacaacacaatgattttcctcttatctcttttctgggccccaggtgggcatcctagtgaggtggccccgcccagtcttacttgccacctcttctagggtctggctttgtttctctccttaaccacaggctgaagcctctcccaacaaaagacctcagcagactccaaatggctcaaagtatgtaaatgactgaaattacccactagaagagaacgttattaagaagggaagaaatctctaatgtgggaacttggatgccaggctccagaaaggctaagctctttcctagaactccctggagccaactttatctgcatcccatcatcaggaaatactcaagagtgtagtgaggggccagtgaggctgttgcacatttatagcacagagtttgaattccagtactagaacagctgtattctacaaaatatgatttttctttccagctcaataaagtcattagaagtaaagccttcttactccaaaagaattcagtcttgtctacttcttaatagtggcctaaaataaatccatagtgccccagggtgttgttattttcttgcattagcacacttgtgtgacagttataaaaagcaatggaaacaaatttaccagtccttttaattttctagttatacctgtgatagataagttacatcataaaatttcccctccaacagcatatcaaattcttcccagctttcttagcctctgtaatatcagtctttgctttccaaggttctagtccatgctaatactcaccaagtttaactgtcctaaatgtggttgtcaaagagattcactgtcaccatctgtctcttaaagagttcagacaagaaaaacaaaatggcagccctctctcggtaattctctctcacacacacaattaattcaaaggggactttttaactaaagcacagttgttcttctactcggacacagttttaaaagtctataatctaccagctggctgggtcagggatgaccatgaatgaagcctcatctatgactcaaggtcaaaggtgaattgcatcacgtcttcaaatctcaaatcctattcagattgttataatagtactgctttgaaggatttcctgtgataaacatagccttccttttataataatttctacctcattatttataaaatgcatgtttgaaattctatacaattcgatttagaatcatttgagaattcaatttctacgcctccattgtttgtttatggttatagctggataaatctgcaatctctcttgttggcatagctgcaagctgcataaaacaaatacaattaaatgtatattctatattgttaagtagcatctgaatgatagacattctatgtctagacaatttaaaagagcaagtctggcgtacgaataacaaaatgcttttgcctgattcatgaatagtatgactttcccctgaatttcattgtaagttttaaaatgttatgaaaacaggggtggggggtggggatttgattcccatgagcatctgaacacttccattgactttacatggttagcaaagatttgaacaatcttaacagggcatgttgtgctaacttctccagtttcaccaagatgtgaagtaaattaaacgtgcgcatttgtcctgtttaaggtttcaggctctgtataactatactcctaggaacgaagatgagctggaactcagagaaagtgatgtcgttgatgtcatggaaaagtgtgacgacggatggtttgtgggtacgtgcctgtttattctcagaagcatttagctctttttatcacctatgtgagtttgctcaagtgcatggttcgctgtgataatggatctctctgtgaattcatgctgtgttatatactcctgcagccctgcattttaatagagtatagcatttattgcttctgttatatgtgattttctactagtcttgattcaaccaaactaagaaaatttccttaaatagcaagcaatggctgtgatgtcacaatggcagtaacaaaaagttccttgtaatgttcaacagtgttcaacggaagatgtcagtcaacaggggagatgccaattgatggggagcaagatgaaaggaaacctgacccatttgctgattctgatgtagcagtcctaagtctagggattgtccatccatccctgcttccattagtagaagggaagactcccttccttgccacttcaaaggcaagcccatagtagttaccaccttaaagactgaaaactcagccaagagcaagcttaacatttcccactgctcaactgttctggggtccccagcaccaagggacaggggaggagcaaggcagatgatgaagaggtgacatgaggtcttctgtgaaaatatttgtagacaaaagtgtacgcccagacacaaaggaaagaagtgaagaggaaaggattaaggtggggctggagagatgctcagtgggaaagacaacctgggttccattctcagcacttgtgctggctatgaactgtctatagctccagctccagggtgacctgacaccttttctggcctccataagccctctggacatgcagtgcagagatgtgcattcagacacccatacacataaacatttgaaaaacaacaacaacaaaatatatatgtatgtatgtatgtgtgtgtgtgtgtatatatatatatatatatatatatatatatatatatatatatatatatatatatacacatatggaaaactttctctagattggccaagcagagctgagacaatacaagaacagaggctacacgggcagacacgtgtgctagattctactgtttgtattaatcaccatctggaagaaaaagggagtagtttacatacagggtttgcaggaatagaaatcaaaccaaaccaataaattatacaatgttaatgagaaatggaattttagagaccctacccaatctactatgccaaaatgcaaaagaatgtattgtccagacttagtagaaactatccaaagaactgtatcatttgaaaccaaaaccatgttggaaatcattctcaaatggtcggactccattccacttgcctagaagagtagtcttgcacattttaaaatgtagtgatttttctattgctcaacattctatattttgttaaggagggtaacagtccgtttttatttagcaagtgaggtagcactgactgtgaggttataacacttgtgatattggcagcatcaatgtagtggtcggtgtggtaccgcagaggcagcctctggctcctgaatcaacccctgtgctttatctgtcattgtgccacactgcaacctcacagttatctcttactccttgcttggcatcgtggtgagccaactcctaccacccagctcttctgcgtgattgttttctagattgagaggctgggcttgcccctttagctcagtgtgatggaaatctatcttttatgctcatgaaaagatcaccacaatcgggcaaaacaattaagttgcctgctttctctttctattgtcttaaagtgagttttctttattccctcccagactattgggagcttacattctcagcgaacccctgtaggcagaaagtcttcacgctgacctaggacctgacattccatcgctgttacataccttttcatttattgcttctgttttcaggaacttcaagaagaaccaaattctttggtacttttcccggaaactatgtcaaaaggctgtgactcacctcactcctactttatgccacatttcagccacacatctgcattaacccacctgaaacatcccagcaggccccttgctgccatgccttatggttcccaatcagccattaccatctccacctgccgccagccaccaaatcaccagcaggagggtctgcctgccactgggagccttggggaggctgggagccttagagaaacgcaagctcacgccttcataaatatgcagtttcctgctttctgccctgaactttgaaatgcctgtgtaaggaatcaaaatgaacatgatcgtactttttaaaagtgaaataattaaggaagaaagaaagaggaaaaaaagagagagagactctccaggagactgtctggtgtcatgactgaatcgccacctctctggaaggtgtaccgtcctcaggaagccagaaggttttgttttgtttttttctatggttctcattttcaccctcagcttggcagttcattttcttttcacgagtttgcctagtgctctggtttacactatatgacaactatacttcagctgttctttgcctgcacttattatatacattgtttcatgcacagttattacaaatcaggagcgtttggaaagttcactgggacgagtgtgattttttgttgagtgcattacatcttcacatgggggcggggaggtcttttccctgcccatgtttttttgtgcttattagaggtgcaaacagcgagcgattaagaactgttggtcaactgttacgagactataaaaggcttagccacactacgggacaaattgtgttgtgaattcgcattgctgttttgtgtactaaaacgtaaccattggcattgtgaacaacaagctcttagtggtgtatttacctgttaaaacttaaaagcagtgttagtgagttaggcagagagatgaaagtaatacagtcagtaagtttcactgcgtgcacactgacacgtttgagattgtaggaggacatataattcatatgctatgttgtacattttatggaaatataaaagaatcccacattattttatagagtacttcaggagcatcctaagtgttaaggctggctttagcaaggattatgatcaatacaactatttttactacaataattatttttcttctatgagacccagaatcctgactccatttgcagacaggaatatatatgtgttgagcctgattttttttctggtgtgtgtaaaatacttcctaggaatacactgggcacttttggaaataatgtttaaatcattcaggttgtgttcctgtccccaaaacagatctacaaaataataccaaacctgaaagattccatggatttacggtgcctgcattccacatagccagagacttagctttgtatttcaaatgaatttgcataaaacctgttcatctttagcaccttatagacaaaactttttatggcttttctcccatgggcaatgcttgatcttatacaacacttacactctagaatattttgtacatatgtttgttctttttttttttttttttgtacagactatttacttgttcaaaaaaaacagtaagatctcccaatttgttctttatcctgcacttaaactgagtttaaactctttcagcagatctcccttcgtggtatcttcacagatcacaagtaaatgtgaatctgaaagatagcatccacacaaaattctataatcggaaagatctttgtaactaatctgaaatacacataaatgtcagttacagaggaacattgttgggggcaggaggtaaagaaacatcttagagaaatccactttactatcaagttcacaaccagttttatattcgaaacgcttggagtcagccagccagccacatgcagctttgctgataaatggataccttttcacaccatttatgaaaacaaaatttcaactctgttgcctgttctatttaagaaaaattgctgtttctactctctgtatctgattttaaaaggaaaaaaaaattcacacctggctttcaggtaactgactttggattcttacaagcaaaggtcattgtgttttttcttgagtagatacctaataaattttgcttgaaagtaccttggcttctcactggtgtttatgtagaccttgtcttattccaaggaattagttaaaaatagtttgaagcatttttgtctctgttatcttgacacacagatggagaaatactcagaggagtattttaaagtctatcactaccaaagcctacttgctaaatcctctacttaaatattacccatcaggcaaagcaccacatctccatatagtgctgcctcaaaactggctattttccaagaagtaattagtgatcacctatcttgtaacttttaaaaacttatctgaaagaactttcccatcattggtctcttgttgaatttcaaaacccctaccatggaaggttcatgctttgttgccacacaaataacaaagagctaccacttgaacttgtgtccttctgaatagctcagttcattcctgatccctctgtttcagcccagatccacatctgtcaaatattcagaaacatggttctgcccttgcctaccagtttgtcgacatgtcccgtggcttctgcagccacacaggactcctgtattccactggatgctttccactgttgcaagctcagtgctgagatgtggtcccctgtgggaag

SEQ ID NO: 2 - DNA, 6259 bp, Mus musculus
  CDS (343)..(4161)
ttcagttgcggatgaacaacgcatagacgtttgttgcaaaggcttcttagccagcgagcagcacccccgtatctaagaagagagggatagatgcccaagcaactcattctgcatagcagctgccacgacaaccctccttgtgctggaatgtgctcacttgaagacgcttggattggacttaatcttaaacctctggaggtcaagaccttttaaaaagggctaaataaacactctctacatgtaaaaggccagcgactcctacttcctctgttggagcaactgaggagttcggcctcttctaggaaaactgaagaagttaataacaaacccttcaaggtgaaaatgaatacagatagcggtgggtgtgctcgcaaacgtgccgccatgtctgttacgttaacatctgtgaagagagttcaaagttctccaaacctattggctgcagggcgtgagtctcagtctccagattcagcaaaaggttttagaagcgttcggccaaacctgcaagacaaaagatcaccgacccagagccagatcactatcaatggcaactctggtggcgccgtgagtccagtgagttactatcagaggccattctccccttctgcatactccctcccagcctcgctgaactccagcattatcatgcagcacggcaggtctcttgattctgcagagacatattcccagcatgcccagtccctggatggcaccatgggaagctccatcccgctctatagatcctccgaggaagagaagagggtcacggtcatcaaagccccgcattacccagggatcggccctgtggatgagtctggaatccccacagccattaggacgactgtcgacaggccaaaggactggtacaagacaatgttcaagcaaatccacatggtacacaagccggatgaggacacagacatgtataatactccttacacatacaacgcaggtctgtacaactcgccctacagtgctcagtcccacccggctgcgaagactcagacctacagacctctttcgaaaagccactcagacaatggcaccgatgcgtttaaggaggtgccctccccagtgcctcccccacacgtcccaccacgaccaagagatcagtcttcaacactaaagcatgactgggaccctccagacagaaaggtggacaccaggaaatttcgatcggagccaaggagtatttttgaatatgagcctgggaagtcgtccattctgcagcacgaaagacccccccctctcccaccaactccgacacctgttcccagggaacccagccggaagcctctctcagtgtcaccctcaacagatggcctgcgtagcccttcccctccgcccaggagctgtgtccccgcaccccgtccgagtgccccagatctctctcccacccggacgggtcgcataaatccagctgacatagatttagaaaatgaaccctggtataaattcttttcagaactggagtttggacacccgcctcctaaaaaggctctggattatgttcaagatcattcttccggtgtgtccaacgaggtctccatctatcagtcctccatagacagaagcctggaaagacccagcagctctgcaagcatggccggtgactttaggaaacggaggaagagcgaacctgcagtgggcccactccggggcttgggggatcagagttcaagcaggaccagccctggccgggcggacctcccaggatcaagttccacctttacgaagtctttcattagctcttctccttcctctccctcgagagcacaaggtggggatgatagcaaaatgtgtccgcccctttgcagttactcggggctcaatggcaccccctctggtgagttagagtgctgcaacgcttacagacaacatttggacgtccccggggactcgcaaagggccatcactttcaagaatggctggcaaatggcccggcaaaatgcagagatctggagtagcactgaagagaccgtttcccccaaaatcaaatcacgtagctgcgatgatctcctgaatgacgactgcgacagcttcccagaccctaaaaccaagtcagagagtatgggttctctgttatgtgaagaagactccaaagagagctgccccatgacatgggcgtccccctacatccaggaagtgtgcgggaacagcagatctaggctcaaacacaggtcagcccataatgccccaggcttcctcaaaatgtacaagaaaatgcatcgcatcaaccgcaaggacttgatgaattcagaggtcatttgctcggtgaaatccaggatcctgcagtacgagaaggagcaacagcacagggggctgctgcacggatggagccagtcttccaccgaggaggtgcccagggacgtggtgcccactcgcatttcggaatttgaaaagctgattcagaagtcgaagtctatgcccaatctaggagatgaaatgttatctcctataaccctagaacccccacaaaatggtttgtgtcccaagaggcgattttctatcgagtctctgctggaggaagaaactcaggttcgtcacccttctcagggtcagcgaagctgcaagtctaacaccctggtgcccatccacatcgaggtcaccagcgacgagcaacctagaacacacatggagttttccgacagtgaccaagatggggttgtgtccgaccacagcgactacgttcacgtcgaagggtcgtccttttgtagtgaaagtgactttgaccacttttcattcacatcctctgaaagcttctacggatcgagccatcaccaccaccatcaccatcaccatcaccgacacctcatcagctcctgcaaaggccgatgcccggcttcttacactcgatttaccacaatgctaaaacatgaaagagctaagcatgaaaacatggaccgacccagaaggcaagaaatggatcctggcctgtctaagcttgcatttctagtcagccctgtgcctttccgaaggaaaaaaatcctgactccccaaaaacagactgaaaaggcaaaatgcaaagcctcagtagttgaagctctggactctgccctgaaagacatttgcgaccaaataaaagccgaaaagcggaggggaagcttgccagacaacagcatcctgcacaggcttatcagtgaactgctgccacagattcctgaaaggaattcatctcttcatgctctcaaaaggagccccatgcaccagcctttccacccactgcctccagatggtgctagtcattgtcccctgtaccaaaatgattgtgggagaatgcctcacagtgcctctttccctgacgtggacacaaccagcaactaccacgcacaggactatgggagtgcactgagcctccaagatcacgagtcccctagaagttactcatctactctgactgacttgggcagaagtgcatcacgggaacgaaggggaactccagaaaaagagaaattgcctgcaaaagctgtctatgatttcaaagctcagacatctaaggagctgtcatttaagaaaggagacactgtctacatcctcaggaaaattgaccaaaactggtatgagggggaacaccacggcagagtgggcattttcccaatctcatacgtagagaaactaacacccccggaaaaagcgcagcccgcaagaccaccacccccagtccagcccggagagattggagaagccatagccaagtacaacttcaatgcagacacaaatgtggaactctccctgcgaaagggcgacaggattattcttcttaaaagagttgaccaaaactggtacgaaggtaaaatcccaggaaccaacagacaaggcatcttccccgtgtcctatgtcgaggttgtcaagaggaacgcaaaaggtgctgaggactacccagaccctcctctgccccacagctactccagtgacagaatttacaccctaagctccaataagccacagcgtcctgggttctctcatgaaaacattcaaggtgggggagaaccgtttcaggctctgtataactatactcctaggaacgaagatgagctggaactcagagaaagtgatgtcgttgatgtcatggaaaagtgtgacgacggatggtttgtgggaacttcaagaagaaccaaattctttggtacttttcccggaaactatgtcaaaaggctgtgactcacctcactcctactttatgccacatttcagccacacatctgcattaacccacctgaaacatcccagcaggccccttgctgccatgccttatggttcccaatcagccattaccatctccacctgccgccagccaccaaatcaccagcaggagggtctgcctgccactgggagccttggggaggctgggagccttagagaaacgcaagctcacgccttcataaatatgcagtttcctgctttctgccctgaactttgaaatgcctgtgtaaggaatcaaaatgaacatgatcgtactttttaaaagtgaaataattaaggaagaaagaaagaggaaaaaaagagagagagactctccaggagactgtctggtgtcatgactgaatcgccacctctctggaaggtgtaccgtcctcaggaagccagaaggttttgttttgtttttttctatggttctcattttcaccctcagcttggcagttcattttcttttcacgagtttgcctagtgctctggtttacactatatgacaactatacttcagctgttctttgcctgcacttattatatacattgtttcatgcacagttattacaaatcaggagcgtttggaaagttcactgggacgagtgtgattttttgttgagtgcattacatcttcacatgggggcggggaggtcttttccctgcccatgtttttttgtgcttattagaggtgcaaacagcgagcgattaagaactgttggtcaactgttacgagactataaaaggcttagccacactacgggacaaattgtgttgtgaattcgcattgctgttttgtgtactaaaacgtaaccattggcattgtgaacaacaagctcttagtggtgtatttacctgttaaaacttaaaagcagtgttagtgagttaggcagagagatgaaagtaatacagtcagtaagtttcactgcgtgcacactgacacgtttgagattgtaggaggacatataattcatatgctatgttgtacattttatggaaatataaaagaatcccacattattttatagagtacttcaggagcatcctaagtgttaaggctggctttagcaaggattatgatcaatacaactatttttactacaataattatttttcttctatgagacccagaatcctgactccatttgcagacaggaatatatatgtgttgagcctgattttttttctggtgtgtgtaaaatacttcctaggaatacactgggcacttttggaaataatgtttaaatcattcaggttgtgttcctgtccccaaaacagatctacaaaataataccaaacctgaaagattccatggatttacggtgcctgcattccacatagccagagacttagctttgtatttcaaatgaatttgcataaaacctgttcatctttagcaccttatagacaaaactttttatggcttttctcccatgggcaatgcttgatcttatacaacacttacactctagaatattttgtacatatgtttgttctttttttttttttttttgtacagactatttacttgttcaaaaaaaacagtaagatctcccaatttgttctttatcctgcacttaaactgagtttaaactctttcagcagatctcccttcgtggtatcttcacagatcacaagtaaatgtgaatctgaaagatagcatccacacaaaattctataatcggaaagatctttgtaactaatctgaaatacacataaatgtcagttacagaggaacattgttgggggcaggaggtaaagaaacatcttagagaaatccactttactatcaagttcacaaccagttttatattcgaaacgcttggagtcagccagccagccacatgcagctttgctgataaatggataccttttcacaccatttatgaaaacaaaatttcaactctgttgcctgttctatttaagaaaaattgctgtttctactctctgtatctgattttaaaaggaaaaaaaaattcacacctggctttcaggtaactgactttggattcttacaagcaaaggtcattgtgttttttcttgagtagatacctaataaattttgcttgaaagt

SEQ ID NO: 3 - protein, 1272 aa, Mus musculus
MNTDSGGCARKRAAMSVTLTSVKRVQSSPNLLAAGRESQSPDSAKGFRSVRPNLQDKRSPTQSQITINGNSGGAVSPVSYYQRPFSPSAYSLPASLNSSIIMQHGRSLDSAETYSQHAQSLDGTMGSSIPLYRSSEEEKRVTVIKAPHYPGIGPVDESGIPTAIRTTVDRPKDWYKTMFKQIHMVHKPDEDTDMYNTPYTYNAGLYNSPYSAQSHPAAKTQTYRPLSKSHSDNGTDAFKEVPSPVPPPHVPPRPRDQSSTLKHDWDPPDRKVDTRKFRSEPRSIFEYEPGKSSILQHERPPPLPPTPTPVPREPSRKPLSVSPSTDGLRSPSPPPRSCVPAPRPSAPDLSPTRTGRINPADIDLENEPWYKFFSELEFGHPPPKKALDYVQDHSSGVSNEVSIYQSSIDRSLERPSSSASMAGDFRKRRKSEPAVGPLRGLGDQSSSRTSPGRADLPGSSSTFTKSFISSSPSSPSRAQGGDDSKMCPPLCSYSGLNGTPSGELECCNAYRQHLDVPGDSQRAITFKNGWQMARQNAEIWSSTEETVSPKIKSRSCDDLLNDDCDSFPDPKTKSESMGSLLCEEDSKESCPMTWASPYIQEVCGNSRSRLKHRSAHNAPGFLKMYKKMHRINRKDLMNSEVICSVKSRILQYEKEQQHRGLLHGWSQSSTEEVPRDVVPTRISEFEKLIQKSKSMPNLGDEMLSPITLEPPQNGLCPKRRFSIESLLEEETQVRHPSQGQRSCKSNTLVPIHIEVTSDEQPRTHMEFSDSDQDGVVSDHSDYVHVEGSSFCSESDFDHFSFTSSESFYGSSHHHHHHHHHHRHLISSCKGRCPASYTRFTTMLKHERAKHENMDRPRRQEMDPGLSKLAFLVSPVPFRRKKILTPQKQTEKAKCKASVVEALDSALKDICDQIKAEKRRGSLPDNSILHRLISELLPQIPERNSSLHALKRSPMHQPFHPLPPDGASHCPLYQNDCGRMPHSASFPDVDTTSNYHAQDYGSALSLQDHESPRSYSSTLTDLGRSASRERRGTPEKEKLPAKAVYDFKAQTSKELSFKKGDTVYILRKIDQNWYEGEHHGRVGIFPISYVEKLTPPEKAQPARPPPPVQPGEIGEAIAKYNFNADTNVELSLRKGDRIILLKRVDQNWYEGKIPGTNRQGIFPVSYVEVVKRNAKGAEDYPDPPLPHSYSSDRIYTLSSNKPQRPGFSHENIQGGGEPFQALYNYTPRNEDELELRESDVVDVMEKCDDGWFVGTSRRTKFFGTFPGNYVKRL

SEQ ID NO: 4 - DNA, 372125 bp, Homo sapiens
gtcattggtctttatgtttttattatcagagctatctaaaatcaaccataactgtcttaagagcattttgtgtaaatgatttataacactttcttgagatggcttcagcagccttattcaactgcatctcctggcacttttaataagcctcttaatatattctgtcatccccatctgttttgatttaaggttgattatacagacacgcagtgctgcaaaaagccacctgatcacttcagtagggtgttaggcatgcattaaactccaggtattttcagggaggaatcatgaagccgctcctgttaaatcatatccattttattacgtctctccttgtggattacgtagaactttggaaaattaaacattagacatcttcatagaaaatcatgtcactgatttttaaagccagctcaatttaacctgccactgattccctaaccagctcttctctgactgtatcccgagggaaaatgtattgaacgcagcagaaggttaaggcagaggagttcggctagaccgggtagcagccaatcagatggggagggtccaaggatctgatgcctccaggcgagcagcgccaagctgagctggttagtctccttttattgtggatgaacaccacgtacatgccgtaaatgctccctaggctggctgcggctacaaggcagacccgggagctgagaatagaggaatacctgcccaagcaactcattctgcacagcagccgacaagacagcgattttcctgtgctggaatgtgcccatccaaaggtatcacttccttttcattgagtttctatatttcttaagaattacggaaagcagagatgctgatcctggaggaagatccctgctttctagtaatgctttgttcctgttctcaggctgagtgccagctttaaaatggttaacctctgggggagaagctactaagcagaataaaggaacactttacgttgcttaagctgactgtgcacagagcttttattaggatggattctttgttactcttgctattgttgcgaaggtaagctggttacaaatgcagctttcaaccatcacattctgctacctttataactaaggagacctgggggaagacctggggtgggggtggagggtctagtatctcaaaggttgctgcaatttatcagcctcagagagaaaaaaggccaaattgctgatcaaaggtagagaaagagcatttggttggtatgaggattcttctaccttaggacacaagttttataaaaaatgaacactgcatattttcactgtgcttaataattaagatgccttaattatcatttataactgacagctggtgtgctcgtccgaaagtcatcagcgtgttaggcgctcttgtttcagttgccaaggtaattggaaggataatttaatatgttagagtaacaaaagacccatgagaaacatattgcattaggtgaggcatgagattgctttgtggagcgtttatttctgagagtgagttccttcttttgtctcttggccccatcaattatctgttagaaggaatagctataacagggactttcatcatgtaccatgcagttgaactaacacagttgtttcttctatacagtaggcaagattcagtttctgtctaagacattaaattgttagtcatatggaaatatttcccgggaagttgttcattatcctctgtgggacaagtgacatcacacatcactgggttatgaatggtggcttgagtgaaggagagaaagtgttttctcggggagcagaaatgaatgcaaagagtgctctgcttcatttcctagtgatctctaagaaacatggcccattgaaatgttaaatgtcacagcaaattatcagggctaacattttatggtatatttgtggaagctcttataagtcatgcagatgctttgtgtagttatttttctaaaagaagggacatattaaggcattgattatagtttctaaattgctagcccggtggtactgtttttttgtttctttgtttgtttttgagatggagttttactcatgttggccaggctggaatgcaatggcaaggtctctgctcactgccacttatctggttcaagcaattctcctgcctcagcctcctgagtagctgggattacaggcacctgcctccacatcctgctaatttttgtacttttagtagagttggggttttgccatgttgaccagtcttgtctcgaactcctgacctcgtgatccgcctgcctcagcctcccaaagtgctgggattacaggtgtgagccactgcacccagcctagcattatctatctttaatagccaacatttgaaaataatgagtgccaaacaataagagacgcttcgtttattcattcagtattcatttatttactaattatggtctggtgagtgaaaatacacttcgcctctgtgacaacatcaattatgctagcttgatacactttgtgattttgtttctcaaaatatttacaatgtacataattttatttataaaatataagcaagtaaaatggaaatgtacatctaatatttaaaaagcatttatgtgtaatataattcactatcaaaataatacaaaattaaaattcaaagttttaagatttaaaaatcaactgtaagataaaaataagattttttaaatgtatgtgagattattgtcttacttatttctatgtttaaaaggcattgcttttgagaaggtgtattagcccattaatcagatggtcacagggagtccattagcaaccttgatgaatggcaacgggactatagagggggtattattttgcagaagagaatacagaaggagggtatcttggatgataagaagtgtccttatacctgagatatataaaatctatttctagtaaagaaagaataaaaagaacaggcagattataatctttaaaaataaagttagcatcaataaaacattcaggacagcaagagatgagttaacttaaggaatggattaaagcaaaagaaaggacgtctccctccgggatgtcctccaggcatgagataatggaccaaggttggccttggacacacacaggtgtgatggaaagcccagctctgcgcctactccctgcccacaccggggagattggccctacttgggcagcttatgagagttgcaagaaatccacataattataagcagttcatgtaaatataagaagggtgtaattataaaggtgtgataaaatcgattcccacctcactggggatgatggagttgacatgattactcctgagaagaggggcctggctacggagccagcaacagaaaggcccttattagcgtcttcatctctgtcctcaccctcgccagtctctttcatctttcagctgacatctagacttctaccttttgagagtattgccttggatttaatgctctgaagcctatgcaaatgcaaatagccttgggaagtacactttaacacagggtcccaccttggtgtcctggtgggactgagcacggaggctgttggggaatgctgagtagaagagagatttttccaaaggaagggtggaaataccagaccaaaatgatgccagtgagagaggaagggctgactggagagcatggagtctgggaaacatattattatgattattattgtttgtgttttttgagacagagtctcattctgtcacccaggctggagtgcggtggcgcaatctcggctcactgcaaactccacctcccgggttcaagcaattctcctgcatcagcctccctagtagctgggattcaggcgtgcgcccctgcacctggctgatttttgtatttttagtagagacggggtttcactatgttggccaggctggtcttgaactcctgacctcaggtgatccacccgcctcagcctcctgcagtgctgggattacaggcgtgagccaccgcgcccggcctgggaaacatttgaagagaccaacataacttaataaatgcccacagagagacctacaagtgggctgtgggccaaaatgaagttcgaagctcaggctgtaaccttaatgggaatgtgacacacacacattttctttttctcggccacctgtgaggatgtttgctacgagtggtgactcatgctgtttgtaggaagaatttgtttattggtttgaaggggaataaactagaggaaaaataaatcaaatctaagggacagaacaacattttttattttttgccaggaagaggcaaaatgtgaggagataatgtgaggaatggctttcttcaaaattaacgctgtcggcatacatgatggactttgatctcaacaaagaacgatacagcctctgagcaggaataattttcagatttgtgcaaccctccagactctccctattcaagggaactgcactgcatgccttgattttctcaaagacgaaatgaatcccatatactcccacctttagggcttagtagtgattaaatctagagaggattccatgctactcaaggaccaaatactcagggtattgcccaggcatgggcaatgggagggcccggtgttctcaggtgacctctacctactggcccaggcctcagtaccacctttaatcccactgaaatgcaaacacctggaggtgaagggccactataaaaagctattttgccaggcttggtggctcacacctgtaatcctagcactttgggaggccgaggctggtggatttcttgaggtcaggagttcgagaccagcctggccaacatggtgaaaccctgtctctactaaaaatacaacaaaaattagccagaagtggtggcacacgcctgtgatcccagctacttgggaggctgaggcaggaggatggcttcaacctgggaggtgaaggttgcagtgagccgagatcttgccactgcactccagcctggcgacagagtgagactctatcaaaaaaaaaaaaaagaagctattttaactttcttctaccacttttgatattctgccatctttttacaattttggggttgtttgtttcctttaccagattggaattcttccaaaaaaagaatagagttgggcttctaatttatgattgcctggctagcaaaatgcctgtcacatagaaaatattgcataagtatttgttcaactcactaacccgatttatttcccaagaagctcactgatgcatgcacactgagctaccaagctgcctaagttacccgatgggaaaggtggccaaattaatagtctcaatttgacttcacaatacaatctgcaaattaggaaaatttacctttgttcagcatctctcagcaaacttaggtcagtggatcctggcaccttatggtactgctgataccagggaactgtgtttatgcccaagcaagtctgacagatccacactgagaaaataacaggttactgtcatctattagtgcaggagcctaatcctgaatgtgcaatgtcagggagggctgttgagaaaggtacaaaggacaccagaagtatctgccacctactgggaagtggggattggcttctaagagggatgaagggcagagatgacagggcagcagtacccgggcagtgagctgggctggaggaaggccctggattaggaggcagggtgatggatcccacgctagtcatcagagaacacagccatttgtcagacatgggaggcatggtcctgtgtcgccctccacaatttcttaaactcttctcatgtctgttcaaaatgcttgtatggactgagaaaggaagccaagtgtatgttttccctgatgtgcctgaagtggtagcgtgatggtacatacctgttaacagctgggaccgtgtgattctaaatcctgttaaggcaggcaatgaaaaacaatgaagcgctggaagggtaccaagaacatttgtcttgttttgttgagtatgatgtcattgagggatcacttgcagtagcatctggtttctgacctgtgaatcaatccatcttacattccatccatccttccttgctttaaactctatcggtatttttcctaccagcagcacaggggaaatacttataggggttcattcagtgaacgttcagcatcctctggaaccatctgggaaccctattcccttcctattctgctcttagagacattcaagctccttccctcaaccccaaaagagcagatatccgccgtgcaggccatagtgcgatttccaaagtgtctctctaaggaatattcagcctgttcttagaggaaaaaagggcaacattattaaaacagagactctcaacaagtccaaatgtgtattaaaaattaaaatattgttcacagcctggtcttgtgttaaggctccaaatatgcattttaaaaaatcattgctgaagtcctggaaggggcattcatcactcctgagccacaccgtcaggcacacctgaattctagggaaatatttgaataaagaatctctatgaggtaacttctggaaattgcctccaaaccctcaacctgcacagaatatagaggttctctaacccactctggtctctttttccattaactgtggccaaaccatgatcttctccctagactacagcctctctgagattttatacttcatctgcctctaattccattatgttcttcaggtctgggattacttcctaattcactatcaaaaattgattcagtgttgagctgtagcccaatgttactttacaaattcattctcaaagtattctttttttttttttgagacagtcttgctcgttgcccagggtggagtgcaatggcacaatctcggctcgctgcaacctccgcctcctgggttcaaacgattctcctgcctcagcctttctagtaactgggattacaggtgcctgtcaccatgcccagctaatttttgtatttttagtagagatggggtttcaccatggtggccaggctggtttcgaactcctgacctcatgatccgcccgccttggcctcccaaagtgctgggattatggccgtgagccactgtgtctggcctcaaaatattcttgataggatcagttaccagttgtagcaaaaactctttgttcttctcttcccctcttcttggcatccagttattatggtgagctgctggacccttgattacttgagtttcgcatgatgaaaagtcagtgagcattgtgaggatgctattgttgtcagttatagttcccaaataggtctcagattcagcattttctttgaatttcacactgtgtttgtttagactcctgcatctctcaccagacaactgctttacgttttaatgggcttttctgcttgtaagactcttccttctttcatctattatccacactgctgcacagttatgattgttaaaattcaattttttaacattattccttcccttaaaacatgtcagagggccactcctcactctgccccccgcccccttagtctaatctcttccaaagtgtggttgcaatcacgtggactttagttaaaaccccgactgcaccattttggtagttgatgacttgatttttatgtgaatgaagtgggatgatatctatctatgttgcattttacttgaggtttaaataggataatgaatgtcaggtatctaagatgccatctgtttcggagtagacactgacaaagttggaaacaattatttctgctcgggtccagtccagattcaatactgggtgtaccaccaaagagactttcattctctgacacctgcctaccatagcagcctcctgctcctcccagcccactgcttcctcctgcaattttattctctagccgtacttggagttctcaaacatcacatgtggtttagtctgcattcctcaatgtttgccattatatgtgctgtttcctcagtatggaatacagcatctctccccaacccccctcctgtttcctggaaatttcttgtgcatcattgaacacatagataaagagcacctgtttcttctcggtgataattctttataccttttaataactcttcaaacatttgataatcctttctatgtgccaggagctcttttaggtgttttaaacattttatctaatttaatattgatcacctttcaccttacgagaaaaagaaatgtaatgtttttaattaaaatgaagtacaaaagaaaaaaataacaatttaatattttgaaattcatagcctggcgtggtggctcacacttgtaatcccagcactttgggaggccgaggcgggtggatcacctgagttcaggagttcaagaccagtctggccaacatgatgaaaccctgtctctactaaaaatacaaaaattagccaggagtggtggcggacacctgtaatcccagctacttgggaggctgaggcaggagaattgcttgaacccaggaggcagaggttgcagtaagccaagactgtgccactgcactccagcctgggcaatggagcaagactctatctcaaaaaaaaaaaaaaaaaaaaaaaaattgaaattcattactctcctaatcacaatgtactgtcttccccattacatttatgaactactggagtgtggaaaccagtgattatcatagcttgaatggatgaatgaacagaaagatagatggatagaagaaaattgggagggctaatgtatattaggggaggtgaaactgtttcctgagatggccaatattttaggaagggaattataacaaagcccagaaatgcctgaaaagatgctatgtaaacaaataaataaaaacaaggtaaaccaagcttaaaccaggatggtctgctgcagattggagagattcaggtaagctagatggcctgataggaaactaagaacagagagaagctgcatcagaggattcctgaaggaagagtctaggatgcactaagaatgggcttcacttcctacagaaacgagccagagtagcctagatggaaaacaacaacaacaacaaaaatacattaaaaaaagaaccggcctctttaagaattcataatatatttgattagcacttccttagtgccgggttccatgctaagcacattacatgaattgactcatttgaacttcctttaaaaaatctcaagagggcggggcgtagtggctcacgcctgtaatcccagcactttgagaggctgaggcaggcagatcacctgaggtcaggagttcgagaccagcctggccaacctggtgaaacctcgtctctgctaaaaatacaaaaattacctgggtgtggtgacatgcacctgtaattccagctacttggaaggctgagacaggagaatcacttgagcccaggaggcggaggttgcagtaagctagaccacaccattgcactccagcctgggcaacaagagcgaaactccatctcaaaaagaaaaaaaaaacccaagaaaaaagagattttgtaatccctattgtgtaggtgagatgaccgaactgtagccagactagtgtaagaccacagagctggcaattggaaggttgggttggaacccaggtttgcctcacttttgccctttaagactctgcagttctgtccctctaaagatactgtaggagatggtttgggctagaaaaaaaagtgaattaacctaggaagaaaagacctcacatcacctccaaagtttgaaactagaggaaaatcaagaaatgcaaagcccaggaaattaaaatatgagaagaaacaggcttccgttccctgctaaactcattgaggattgtgagatttccctgactatagtacagatcccataagagtgccattactgtggcagcgagattgctgtggacactgaagaccaaccacatgcacaggttgcacttttcctggataaggggtagggagaggatggagaaggaattcaagaaaactgaaagggggaaagctataaatgccagggccatgaactgcggagacacaaatcctcctttttccttgatccgattttaccctggatatgtaattgttggggaatggagtagaaattgatgggaggaggtgagaacactaagtcatgggccaggtacccatctgttggggtacaccccagggagaggtttggttgtatgaccctggcacacatagtcagggatgaaagatgatttctggagtcagggagcaatctgacaggtcatcattttgcattttatttaattaagtatttttatctgttcaatgaaataaaaagccaaccgaaggttttattgtcttatttggcactttaattgaaagatatgtgctgtaaaatatgtcttatttacaaaattaggttcagatgtacattaagtgttgaatttattccattaatatattttgaaaagaatgagttcatcatttagaggagaagcagggtggatgaggagatggaaggatgtttgtttgtttactttgctttgtatttcctttgctgatgttttgattagaacactacaaagaaaagatatttggagatgtaaatgggcaagaaatgtcatatattgatttttctggaattcatatctatgtctaactctcatctcaagttttaagcttcatccattttcaggttcttacagatgctaaacttacaaaacatatttgtaggcttgttgctctttccaacccatccctgtttcttctattctcaccattgccttcgctcacactcacatttttttgttccaattatggcaataaccttgtgataggtttctaggcctgcctcctccaacttctacatacttgccagagttgactttcgaaaacacacatctactcatgttctctttttccttttcttcttgtttttccttccccacccacccccccaacatcctatgggtgctgtacggatgtggtaacaagctttgagggagacacatgtcacacacatgcatagaaacccaatcatcacacctatcaaccccaaaaggatcacttcctcatgttagtaactttcttaaactttttaaagatagccctttattctcagaagaaggtccagctttgctcatggattacaaagtcttgaccatctgtcaacatgcgagctcccaacagcctctgccccattgccatgaagctgccaaacacatggttcttttccaccacccttgcctttctgactgctgctgcttcttcctggaacatcattccctacccctccatcccatcagtcacttcttactccggcccgaagccctccatttccgggcacatggcacatctcacagcaagcccctgctcacacacttagccagcatggatcagatatctgtcctctctgctcattcagcacctgtttgtgtttctaacatgtcaaccatttttaatttatgtttgcctgattctcgagaaatgtttgttgagtgaataatgacaaaaacaagaatttctaaaatgaaaagggcaaagaacatatatttcctatagtaatataatcagtggaacactagaagaggatctgtagatgaaatcaaattttcttcctaaaggtttaccaaaattgtgcaatgatcgggaaataacttgggatttgaatcatcatcatttttcattcttgttatgaaatgttgcctattaaatgtgcctacccttgacctaacctcagtcaaaaatttaaagacatagctaaaaaatttgctaagtcatatgttataccttttatttgttgataatgctgtccaaatatttggtttggtttcttcatttattcaacattattctctcaggagagagctgatggggttcataaacttctcaaaatggtcaacttgtcattgcaatggttactgtatcaacaagttgacagaatcaaataggtggactaaacttccaagctatcacaatgcatttagcttagtaactgctgatggtctatattctacttaatgttcagggcccatctccaaatcaacaccaacttgagtaaaacgtggcgggcattggcatatatgagcacgttgcatagtgtgattcataagctccaaaagttcctagagcactcatgattttatgtttggagcaccctttaaaggcttgatattagtgttctttttcctataaattgttggctgctgcattggagaaattcagtgacagagtggttttgtaacagggtttgaccccaaatatttcggctgttggtagcgatgctaatcttgcacttacctgtgccatgggattgcagagaaaagctcattgttttatgattgtgggacacaccgtaatatggagtgtcctacaaatgactttcacagaatcatatttctttatacttgtcttcattttccaggatgtaaagtcacttgaggcgcttgtctcatgagtatctgcaatgaagcttcatggatatatgtatgttcctgaactcttttagttatgccagcattttcctgttaaatatttataatgacttagtgccacatttcagcttctctgtagtttgaaaagtgtcaatgcatcaaaagggctgtgtgatttctgcactatgcatttcagatccaaattttagatgtgttgtgtctttatagtctctagattgactatattgtgtaaattcatatctggtctcatttgttagaactgacatgttacacagttctgatctctggaaatgaactgacattgagactcaatctatgtaagtatttaagtgatgtggctgacatcacattgatgtcaatgaaagtgtcaatttggaaactaggcccaggctagtggccacacagtggctttaagtgggtgcttctcatctctatttggggccccgaaagcatttcttgccagtcacttacttagaatttgcagaagatttaagaaaaagtagttggctatataagcgtttggctttccgtatgagggctttcctgtgtgaagcatatatgatcagttatattacaggagatttaataaaatagtttcctaataaggagtgcagaatgacaaatgtaagtaggacatagctttgctaagtaactttctgaagcactaccattagcttcgtttcaacatttttaccttcaacatttaaacaaacagaatgattgaaagaatagtacatcaaatacccactagctggatttaattattaacatgttgctgtactgctaggtcctcacgggcatgtgttttgaagaagcatttgaaaataaattgtaggcatcatgacgtacttcactcctagaaacaggagaccccaagagtaagggcattgtattacatggcctcaattttataatacaactaagaaaattaatagttttctaatataacctaacgtccatttcacttttagtctttttcaattgttctttttaaattattttattcttttgttcttcaaccaggttatactggaggctcaggaatttcatctctattaatctaatatattccccctgctatttttccctgtgacattgactttgtgaagagaacaggccaattgtcttgtaaaacgtcccacagtgaggatttgtgtgattgctttattgtaatgatgttccctttggttcctattaactagaaattacttcttacagcttgagtaggtaccatttgtatgtttttggcaagaatatgtcgtagatgatgtttctatgccatcacatctggaggcacacaatttcatgacatcagaattcagtgatgctgcagttgattttttggttaaggtggtgactgccagatctttccaaaaagaaaagttttcccttttacaatcattaggtaatctgaggggtggtaatttgttactatgtggaatatcctatttgtccataactactaggttcgtaggttgaaatggccttaagccacccaagggatctttcctgaatatctcttttctgaatgtgtttgaacgtgatctatgaggaaattatttctcctagaagcaccattaatccaaatctgtttcatcaggaaaaatgtcataagccttctaaaaattattgttgcattaaaccaccttcattaaagaaaatatagatgatatcaaacagattatctgtggaatttattttctcatatcctaattattaaatatacaactgtcagttcatcatctgggtgtaaaccacatttttttcagtcacactctcagaaacaagtagaacaagttggagagaaagctgtcacttgtttttccagtaattctatcagattatgaaccagtctgcaaagtaatggaagatctaatataagacatacatgatctctttccctatctacattgtaaactccttaaaggcaagaaccatagttctgattttggggtggagataaaataaggggcaaaggtggaaattgttctaataagagcatggagacacattgtactgaggggcaagagtaaagaaaatatggggccatgcgcggtggctcatgcctataatcccagcactttgggaggccgaggcgggtggatcacgaggtcaggagttcaagaccagcctgaccaacatggtgaaaccccagctctactaaaaatacaaaagtcagctgggcatggtggtgggcacctgtaatcccagctactcaggaggctgaggcaggagaatcactcgaacccgggaggcagaggttgcagtgagccaagatcacaccactgcactccagactgagtgacaaagtgaggttccaactcaaaaaaaaaaagaaaatataaacctagggaaatgtagtcatctaaatgaaggtcctgttcgatttgaggactgcaaaaagtgctttcctaagtgggctatggggggcctgttgccctaagagcttctacaaattctttcttcccagaagcatttcagagttacatgaaaattccaaacagaaggaagaaaaactggaattttcatcagtatcttgcttagtttctccaagtcttagttttttgttttttgttttaaatggaatctggctctgtcaccccagctggagtgcagtggcatgatcttggctcactgcaacctctgcctcctgggttcaagtgattctcctgcctcagactcccgagtagctggaattacaggcgtgcacaaccacacctggcaaatttttgtatttttagtagagatggggtttcaccacattggccaggctggtctcgatctcctcacctcagacaaactgcccaccttggcctcccaaagtactgagattacaggtgtgagccaccgtgcccagccatccaagtcttacttttcttacatgtaaaataaataatttgaaagctgtaatctctaacgttctttccaccaaaatgactctgtggatctatgggtctgaaatgtgttatgcaagattggaggcggggctggagaaatgggtgcaatcatactcgtgttgagtacaggagtgaggaggaaaaactggacctgagagagtgtgggctgaatcagagggaaagcaagaaactggaatgtctccaggatagaaagcaggtcatttcccgggaagtcagctttgtgtgagattataagaagcaatgctggaaaggtatgcagaactcttcattcgttcaagatttttgagggcctcctatatgtctagacagagaggatccagagataaacaagtatattatttccatgttctcatggagatagtatattagtgggaaaagacagataatataggaaaaaaatgtaacctcatggccctctaatgcaatggttaaaggtaaaggctttagagccagaccatctacattcaaattctagctctccaacttgatctggagcaagacagttaaccttttcctgccttaatgtcccatctgtgtaataataggacccattttatatggttggaacatgaggattaaagaggaaataaatgtaaaaactttagaatggtgtccggcacgtggtaagtctgaaatacatgttaattattattatgatgatgcagataagtgctgtgataataacgaagtagacgaatggcatggtttttcaaccttaatcctactgacatttgtgggaccctgataattcttttatgtgggcagctgtccagtgcattgtagcatccctagcctctactcactagatgccagtagcaactcccagtaacgaccaccaaaaatgtctctatccattgctaaatgcccctagggaggcaaaagtctctcctgactgaaaaccactgggttagagaataaagggtgcaatatttttagatagggcaatataggactcctcaaagaaaaacaggaacagactcctgaatgatgttttgcacacattttgcagcgatgagaaaacctgggggagactgctctgtagaggcaacagcaaagataaaagtacctaggctggaacaagttggtgtagccagcttgggtggagaagagtaagattatgtcaaagaagtaggtggggtcagagtctgaagggcagtgaagaccctggcaatcagtttggattttattctttatatgctgagaagctattagaggatattaagccagagaatgacaaagcaggaaagctggtgtggagcggaatgcaagtccagtgagagatgaggggggcttggacaggagcagtcagaggtcatggctggggaggtggtgagctgcaacaggattgcaatgtatgatggttgaagaatatgtagaatggttcttcatgtatggggaataagggtaaaaagggaaaagcacatttatgaggaaggagtttaataaatcagtaattctgtctaggccgtgtgccatttgggatcctgcaagtggtaactgggctgttgaccatactagtttggagatcaagtgaaagattggtcctggagatatatgtttgggagctatcagtgtttagacagtacttaagccatggaaccttctgagatcaccaaaggagagaggagggtgaggtgggaaggccatggaccagttctgaagcatgcctacattctctgaagagacagagaaaacagaaatggccactgatgtaggaggtcagcccagaggctgtgtggcgtcttagaagaaaagcaaagaaacgcttcaagagggtgcggctcatctgggtcaaatgctaccaagaggtcaagtaagaagagaactctggacagacatctggatttgacaaggtggagagtgttggtgactatgatgagaatggtttcactgggggcatggggatgaagggctttctggagttgattctggagacagtggatgggcgttaagaaagttgagacaggccaggcgtggtagctcatgcctgtaatcccagcactttgggaggccgaggcgggcagatcacgtgaggttgggagttcgagaccagcctgaccaactttaggagaaaccctgtctactaaaaatacaaaattagccaggcgtggtggcacgtgcctgtaatcccagctactagggaggctgaggcaggagaatcgcttgaacctgggaggcagaggttgcggtgagccgaggtcgcgccatcgcactccagcctgggcaacaagagtgcaactccatctcaaaaaaaaaagaaagttgagacaggaagtgcagatacctctttggagaactgttcctgggaaggagaagggagaaatagagcagcagtcagagagggacgtgggccaaagaacacactgttttttggttaaggtggaagtattacagcatatttgaatgctgatggaactattccagtgaagagaaggaaactgatgatccagtgggatattaggaacaattgcacggaagaatttgttgaggaatggaagaggtaaaatacactgttgacaatgggtcagtttgtctgatgagagaaggatggacagttcaataaaatgagagaggagagaaatttaggtaaaatggtgcattcagggtgaaaaataaagtaatttttgtcagaatacttctattttcttaaagtatatagcaagaccatcaacatatggccagggcgcagaggttaaagggctgaacaaaagataaaaaggcactgagtattcctttaggagagagaacaggagtatttatcgggaaatctgttagaatcaccaggcagttttaaatactgattgagccgcgtagtgatgtctttaaaagtgagacccatcagcacatttgcatcctttttctttgttgctttcgtgctttgaagcggacataatgtagttagagggttgaatgtaaacagactggtgtattgccaggcatgtgtacagggggagaatagaggagcaggggatgaaggcagaatatgaagggacatttgcactggtgggttctggcctccaggctgctgggggggaaagcagttgtggggagtggtgctgacaggcgggaaactcatagggttggtgcactggggttctcggggaggtggaacgtaaccagagtgtagatactaggataagttgcctggaatgatcagagataattatcagagtggatgctttccactgggatctcagaaatggtcaagtcttgggtgatgaatggtgagattacagagagctttgacacgcaggataagaagtttgagttctgatcttcctgagcaagttgttcagtctggagtttgtggacaagttttagagcatggaactagaataaaagggtgtgtgtgtgtgtgtgtgtgtgtgtgtgtgtgtgtgtgtgtatgtgtctacatttttctgggtgagaggatcctaggttcccctagattatcaaaagaatatctgaactacaaaatgttaagaataatttcttggtcaggcgtggtggctcacgcctgtaatctcagcactttgggaggccgaggcgggtggatgacctgaggtccgaagttcgagactagcctggccaacctggtgaagcctcatcgctacaaaaaatacaaaaattagctggacatggtggcaggtgcctgtaatcccagctactcacaggagaatcacttgaaccgggaggtgggggttgcagtgggccgagatcatgccactgcactccagcctgggtgacagagcaagaccccatctcaaaaaaaaaaaaaaaaaaagaatgatttctctaaaacctaggaggcaggcagccactgacagtctctgaacagcagtagtggtgtgagctgctatttccaaagatgacactgagtttgaaggggcagagaggagaagatattccaactctgaagagatgtgtaattctccacttacatagcacagaaaggagtagatgctggagccgactccacagcacagcacctgtggggctggatgccggtccctgctgaggcagcatccctcttcacatcattctgtgttcattgcttcctcattcctcatttccccctcccctccacttccagctaaaataaagtggttttaatgaggcatcacttggtgagctttcgaatcaggagcctgtaggaggactgaaccaaggatgtagagccctgctaaatgcatctttcatcactttggggcaggaggacagacctagaggtactttttgacgaaggatttagtgcatttgttcctgggctcaggaaatatggagttctccacttctgaagttaagcactttagtgcccatcaaccttaagattgaggcattatggtgtcaataaagagcaaaaatcttggattcagatacatggctaagcagctacttcatttcaccctaacaatagctctgttaagaaaaattgaacctatctcactgtaagagtaaataaacagaagtttcaagaaattgcctcacccacggtgagactgctagtacaatgcagaacttgatatacttttcaaaaggtcacatgtatttctcaaagcgtaggaaacatgctcctccagttctcgtgaagcactcactcactcactcactcactcactcactggcagaagcacgagatgaatgagttttccttaaaatcgggttcaagcaccaggctgacaggaaaccatgtcataattaaaatcagtcaatgtcattgttgaaatagaatgacttgtcattcaagaagacaattctgagtggaatttcaattacatttggaattaaaataactgtgctatgtaatcttttagaaggtagtcctcttactgtctaagaagctgaatttattttttaaaacattctaattaggcattcttgaggaatttccaccttcagtgaaactgacagcccgtgccatgctgtgccgtgccgtgcatgctgtgctgttggtagtgagagcagaagctgagtgtgggaggtgaaaggagactcttgcatagtcttagaagcagacggaaagggaaatcttctgtaaattgcatttctaatcaacgtgatgaccatgttttctagccctaaaattgggacatgtgacttgacaaagagacagaatactcaaaactgggaatgatcagaaatatgggatttatggttatcacactattatcaatggtggcaagggtcagcttgaagaattcagaattaaaatttagattagatttgaggaaatttactttaaaaattaatttctgaatatgtcacacttatgaacattcaattctctgtcttgaaagcttcccaccacctccttctcctaaatatcctgtttgtgagttcccatacgtactttataactttgtgtaattgatggtttcagtacccattgcctatgtgcaactgcattcagcctttgtagttttggaactgaggatactgcccactctcagttggccatcaataaatatttgttgcagggatggagggtgggtgaaactggagccaaccagagccaggataaaccatgtgccttggtgcttttcttgtgaaggctttatatttacttctcttcgcacaactaaatatgggactaagtttgaatagcacgtgtctcctcattgaaaacttaccgttggccaggtgcaatggctcacgcctgtcatctcagtagtttgggaggccgagtcgggctaatcacttgagctcaggagttcaggaccagcctgtccaacatgcaacatggtgaaacctcatctttacaaaaaacacaaaacttagccaggcatggtggtgcacacctgtaatcccaactactcaggaggctgaggcaggagaatcacttgagcctgggagaaagaggctgcagtgagccgagatcataccaatgcactccagcctgggtgacagtgagaccatgtcacaaagaaaaagaaaacatacctgttcactactctcccacttaattttcaaaggcagcctgtgtctcttttccacattctcccatgatgctctgtgttaccaactacggctctgattgattattggtgtctctgtggagagtaaatcatgttttccacccatatacatatctcaaaaacagcccaccgttctaggttttaactggacagcttcaaattggtgataattagccctatcaataccctagttaaagttggtatgtctaaagaactagttcttgggtactaacaatggctactcatggtaaaatgttggccttttggtggagtttgttctaatgatctaatgtcttaatattgctatagcacttggaatagtgctgggacatagtgagagacatttttgtgtttgccattatcttgctttatatctcaacaagcttatgggggcagagaaaactgatgcaaaagtcaaggagtctcttaaacgtgttatctcccatggcttagttttgagtttcttgttacagataagtgatatttaagcataaaataataaatttaaaatgtggtattgatagctgagactcagcccctttatggtgggacagaagcttgtggaaatagtagatacttgggattgaaccccttgtgccttaaggaccagaaaaacttctcagttattgaatttggatcgggttttactaactgatacattgcctattggtttgtgggtacaaactgtgtttctttggatttttcttaagaactggggaaagagctacattagccttgattgttggctgattttgatatctgtaatgatttgacttggaacagaaaggcagaacatatttcatacatagaaggtactatccaaaacacctaaagtgcaaattatggagaagcgacctgactcagtaacaaactatcccgaagagccatgatcaagcatcttctccttgagcagtctagggatgcacagagggggccacagaacagtgtttagaaagacagaccccgtcttgagtatctgattagagttgaatgtcagcaactgccttgatttctctctcattttttttttttttttgagatggagtctcactgttgcccaggctggagtccagtggtgcaacctcagctcactgcagcctccgcctcccgggttcaagcgattctcttgcctcaacctcccacgtagctggaattacaggggcccgccaccatgtctggctaatttgttgttgttgttgttgttgttttttgtatttttagtagagctggggtttcctcatgttggccaggctggtgtcgaactcctgacctcaggtgatccacctgtctcggcctcccaaagtgctgggattacaggtgtgagccaccgtgattgaccaaaatttttttgttctttaatatgtaaaatctcatattgctttgtggaagggtgagagttttctaaacaaaagcaaattggatgcctttattctagaagggtgtcttcattctgtttcactggtgagtgcaagcctttgcgtggcagggacagtgccttattcatgttttatcctgaagggcttacagaggtcacgccatgaagagcggttctgaaaatcatctgtggaatgaataaatgaatgaaagcaggaaaggctcttgtcctctagattgttattcaaacagtgttcgaattgctatattatccaacaatggcatgcgggaaaagacatgagggttaaaagagaaatcagtcagcaaaagtgccaaccagagagggactttaaatgaaacctactgggaaaagttgacggatgtgtcttccctaaagattttattttttcctatggggaaaaatgctttgaaggaaagacttttgattgagaacaaaaccacagtctctggaaagtgtgcagcttagcaggccatctatagagagactttaaagccagttggaggtcaacttatgttcctaagctctgtaatcttttcaagaagggtcttcatatcaggtggcctactttcactgaaatgccactgatattggctaaattctgtttcctttccaattcatattctgaagtcttaacctccagtacctacgtatgtgactttttttgggaaatgagtggctggtaaattaacagattaggtaagattaggtcattttggagtggggtgggcatttgatccaatataagtggtgtccttgtttataaaaaggggaagtttggacatggacacacgcgcaaggggaataccgtgcaaagatgaaggcagagatccaggtgatgcgtctacaagccaaggaagccaaagacggccagcaaggggaaaggcaagcaacagactctcccgcacagcctcagaaggaaccagtctgctataaccttgatctcaggcttccagccttcagaactgtgagataatgcatttctcacaggatgcatttctcacaggatgtttaagccatcctgtctgtggtactttgttatcacagcccaagcagacgaatagacccacagatgattcaaacactgttgtactttaatggttactgcaaaataccacagttcacgatgattctacagcgatactctagaactgctgtaacgttcgagtagacatgagatcactgggtggattgtgtttttaccaacatatgaaactgtaattatccatgagcaccgtactgcctttggagacactgctgggactgtgactcagacctcccttgagacaactggtcattaggagtcacagtgatgtggaatcaactttgtctttctgaaaagctggagatattcatcatagcctggactgcctgggatctacatgttttctccgtgttgtaatgatgtgaaacactttattagcagaggaagacatttttaggagaagcattttgaatcagaaggcttaagaagaattctgcttttctcgtgagtatcaagtagttgattattgagaactgaaaacattgtagaaggataatttacaaaatgacccttaaacatctgcatttatcatggaagataaaagtctagagaaactgttttttagctgctaggaaaagctgtgttttcttcagagggtaagtcatagagaaggatcatggtgtggccagggcaaccgagccccaggggggctcatccgctttaggccaggccctgcctacagcagtttgcagaggctggtctcagatgcttgccaacaaatacagccctgcaatgcagtgacattgcattccggcaactctctgttctcttcatattttctcataaaatcttggctctggctaaagagaaaatgccgtgcggtaggcttagctccttaatggtgaggtgttgatttggtataggtctgttttcagccaacccagtacttaatgtgtggggattttgttgttgttaatgataacagtattgtctggccaaaaaatcatccttgccatccagaagtaagactatcatcgaatcacgccacttctgcttgcagacaagcagcagtggacatgtcaaaaccgtgtgtggttattaaaagttgacttaacaccctactctctaccctccactgtcctttgcaagatttcttcagtatatcaggggatccatccttttttccctccactgcccccttcgtagctgcccctctgacaaatgcctcctaatcccgcaagcattgctgttcagctgcttctgagtcagctcatttcctcatgatcttggggccccttcctccaagtggtttaccaaggtgtgtgtttattatgtgtatataataaacacacacatatataaataaatatataataaacacacacactaaatatatatctgtatctatatctatatctatctatatatatatatatagagagagagagagagagagagagacaggttcttcccttaagatgtactctagggcaatctcatataagaattcttttccacacacttttactcactttctcttaactcctgtaaacttagaggctagaccatttacttacatgtccttgttatctttcttctctttctgcatgtgtgcatgtgtgtgtgtctgtctgtctctgcctctcctgtctttttctttctttcttttctttattttttgtattgacagtgactctctccctaacctcactctggtctgtccttggcccatttagtctaatttcagcaagaatcctgctgcgtcagtttaatgaaagtcccctgcacttggggtctgatcccccttggtacctgatcaaatgcctcatcccctagccttggtatcttatcaccctggcctgccttcaacaagattatttttgagtcagcctagtaataacccccggccttgatgttcccacttagtaattttccatctgctcacccgcagcctgcttcttggccatcagtctccgctcgtccttgtagttggagttgagctcagtcactcttcccaactacaaacctccttgtggtgtcccccctcataaaatctgtgtgtccttaacaagtgtcatgaatatttttttctctagcagtaaaagagttattataattagaccataagcttttccaaggtaaaacttttctccttggctcctgaaatcatgagtatatagtagttggtcaataaacatttgctagtagatggattctcctcttccttctcattttcccccataccctccttattgtcttgcttcctttttccttctctgtttagcataaaaatgatgaatcataatgataaattatctaatgtgatcataatgtatgtaattctgtgtagaattgttcatatacttataattataccataaaaagtgaagatatcatcactttaaatatattcatgtgttttcttcatttaatcagcattctctaacttactattaatgaaattatccatttcaatagggtaggtatatcaatgcattgagtttttagaggcacatacatttcacagggacttagtgttttataaaaatatgtagcattgatgcattaattaagggagaagtaaaaatccacagaattcgtatacaagtcattattactttttccatcacagaattctgcttctttttattttataagaagaatatagaaactatgatttttcattgcttggaaacaagtggatagcattggaggaggggacagatcatatttcatgagttacaccttcagaataacataagatagtgataaggagaaatatcttatcaaaacagagagagctgaaaggattcaaaatcccccagtttaaaactctatccagggccgggagcagtggctcacacctgtaatcccagcactttgggaggccgaggcaggcggatcacgaggtcaggagatcgagaccatcctggctaacacggtgaaaccctgtctgtactaaaaaatacaaaaaattagccgggcgtggtggtggcggtcgcctgtagtcccagctactcgggaggctgaggcaggagaatagcgtgaacccgggtggtggagcttgcagtgagccgagatcgcaccactgcactccagcctgggagacagtgagactccatctcaaacaaaacaaaacaaaacaaaacaaaaaaacctctatcctagtgttataatagagatacaagttttattcactaacataaagtaataaaaactgtaattctatggggttttcttgttatgtttgggggatgaggaggtgaccatttaaaatatccctgaaaacaagtgcagaattatcagtttcatatgttgttagcatcctgttctgattcttgtagaaaagtagtgacaaagataacacacatttgttctgccctcgtgtgtgccatgcatggtaagtgctttctgtacattgcctcattgactcctcacaaccacatcgtgcagtcatttcttttcttatctccattttatccatggctgagctgaggcttgagagtgaaataaactgcccaagttcatccccgtcaatagcagaatatgagattcaacccatagtgtcacacacgcccaaaatcaggcttttaaaaatctctttgcggccaggcacagtggctcatgcctgtaatcccagcactttgaggggccaaggcaggtggatcacgaggtcaagagatcgagaccatcctggccaacatggtgaaaccccaactctactaaaaatacaaaaatcagctgggcgtggtggtgcatgcctgtagtcccagctattcgggaggctgaggcaggagaatctcttgaacccgggaggcggaggttccagtgagtcagtgagtcgagattgcaccactgcactccagtctagcaacagagtgagactctgtctcaaaaaaaaaaaaaaaacccaacaaaaaacaacaaataaaacctctttgctatcataatgaaaacaattgacctttgatggatcatacaaatgagatatttgcttgtactctgctttaaactcaattataaaagactttggaaagaagagctatgatgatttacagattgaatctttctacatcatgtgaggttgatttcttgaagtttctcagaactggattgacaccctctgagtgttaactggttggaatgaatccaaattccttcagcgcttgtggaagcctgggtcacctgtctcagagatgtttatcccagacttgcagacccagaaatcttgtgaggtgctgcccaggaacccacagtggtaacaagctcgtcataggattcttgtgtaaactaaagttttaaaaccactgttataagggtgatttctctttctataggtggaaaaagattacatccaaatgtttagtttaaaggaatatcactataattgtgataaaccaggagttgcaaactcgtggcctgaatgacagtagtttttcctttggccagcacagtttgttaccataagagtttggatgtgtttatgtaaggcatacgccctctatttcaacacagtgcccatgacttcctagcatcttagactttgaagatacctgcatgatccctgaagaaagctggaaagaagaaccttcttggccaggcgcggtggctcacgcctggaatcccagcactttaggaggccgaggtgggcggatcacgaggtcaggagatcaagaccatcctggctaacacggtgaaaccccgtctctactaaaaatacaaaataattagccaggcgtggtggcaggcgcctgtagtcccagctactcgggaggatgaggcaggagaatggcatgaacccaggaggcagagcttgcagtgagccaagatcgcgccactgcactccagcctgggcaacagagcaaaactccgtctcaaaaaaaagaagaagaagcttcttatacatgaaatccatgagatactggggccccacgtgcctgactctcccgcagtgctcaagacctgtctataaagtagtttttctctttgttcagggagttagacaaagaagaaatatgttttctttttttctttttgagatggggtcttgctctgccactcaggctggagtgcaacaacagggtcatagctcactgcagcctcagactcctgggctcaagtgatcctcccgcctcagcctcccaatgagctgggaccacaggcacataccaccactcccaaataatttttattttttatagagacaggatctctctatgttgcccaggctggtattgaactccttggctcaaggaatccttccactttggtcccccaaagtgatgaaattacaggtgtgagccactgcccccagccagaaatatttttttttctatgcttcttcttgccctctataagtgacttaaatattctcatgggtcatttgagacctcagtcctttttgataaagcagaagggaaaaaatggacaggaggccttcagtgaaaacaaaccagcaatatgagtatttttcagaaattaagaaaataaaacaatttatgttaaatcaacaaggtgacatatcaaataaaacaaatcagaagtccgtgttggtgatgaaaatgataggacttgtgtatcccttgagtgttcaccatataacaacagtacctataagggctttgaaaagaaaaactgtcaaaattaatcaagattcatttttgggaaaagatgacatatttgacaaattaaaccacttaaggaaagaatagtagaaatgacatataaacttaactttatttcatcaatataggtaattgaagtaattgggcttttattttgtaactaaatatatgtagttttcaaattaagatgtaatggaattttgactaatacttaattaggagcctttggttaagaactgagtgctctctcagcaaactaacacaggaacagaaaaccaaataccacatgtcctcactcataactgggagttgaacaatgagcatacatggacacggggagtggaatatcacacaggggcctgtcagggggtggggggcaaggggagggagagcattaggacaaatacctaatgcatgtggggcttaaaacctaggtgacagattgataggtgcagcaaaccgccatggcatgtgtatacttatgtaccaaacctacatgttctgcacatgtatcccagaacttaaagtaaaataaaaaataaaaaaaaggactgagtgctcaaaatttttttataagttaggaaaaccaaacaaaaattatatatacacatatataatatgtataatattatatataatatgtataccttatgtatgtaaatgtattgttgtatgtaagaatatattttatatacatataatattcacatatatatgacaatgtgtaatatatattatataatatgtggtatcatatttcatatatatcacatataaaattgacttgattttataatagcatggcagttcaataagaaggaggaaagtaaagaaccgtaaaatcctctttgttcaacttttccttggcttgtggcttatatagagctatcctaggtttcttctgctggttaaggattgcttatttgtgattaggattagttgatagaattaatgtcagggtcagcaatggatgagtctgtaaggggagcccgtgtgctctaaagtgatgatgaaagtcactttcttagaaataaagatccttgtgccacatcaaaaagcttttaaatatgtcaattaacctcgcatgtttcctaagtaaacagagatatgggcaaaggtaaatctataaggatgtttatcagaacaatatttaaattatactaatataaaatataaacaaactgtgctccagaagtagtatacttgtgttttaaaaattggcttttataatagaattctacattgccattaaaaaaaaaacaaaaccacaacttgaacatttcaaatcaacacgtccaaaacgaaacgctttccaactagatgtcctcccatcatttatatatgagtgtttccatcacctccgagatgatcatgccagataccaaaaattgtccaattcccctatctccttttttgtctccctaatacagccccatagtctgtaggcgacaaggcaccgcctccaggactcagcctaaactcatccactttcctctacccgtgccgccaccacgctagttcgagagaccatgccttcttgcctggaaactatgctgtagcctcttaccacggccctcttggcattgcagccagggcagtcattttcaaaatgcaaattagaccacgcccactcctgtgcttaaaagccatcaggtcctccatttgtttcacgtgagatcccaagcctggcacatagcgcggttatagcgcagtccttgctctccagctctgtttcagcttactctccacctcgctgtctgcactccaggaagggtagtgtggctcctccgagtctgtgtgtgctgttccctgtgtctggaatccttcgctcccacacagcgctcctcccttccatcaaagaaattgccttcttatctttgacctctcagcttaagtcctgtcttgccagaggagacttctatgctctgtgatatggattgagtccctagttagttctttcttatagcgccctgtcaccctgcacccggactctatattgcatatatgttttgtaattaaaatttcatttgggcctaatacctgcttgacccatgggatcgtaactctgagaggaggtaatcttgtgtgctttcttctccagccacctcccccatgcctaccgatacagtgcagatgctgacagttgtcactcagcgaaatgtgtagagtgagtaaataatgtctgacatttaacagtcatcatcatatatttccaaaatgtatctttttaaatagacatgaacaaatatacgcgtctcatacatattttgaatatgcgactatgacactaagaatgcaagcaaaagttataatggttctctctggggggagatgcgttttaaaaatatatttctgtgtttttcagttatccattgagtactttcatccttaaaattagaaaaaaaatgtgctattttgtaaaatgtgtccctttcttgcactaattataattctgaccacccaccacatcctattctgcctctagggctaggactctaagacaatgcgtttatcaattttaaacccagctgtacatgtacatatttaaggaccagtggcattagaggatatattctcaaaaagaagaatgactgttttagggaaaaagtccaaagtggcctcagcaaatcacacagtttatcagaatattaagtaataatataacaatgagaatgtcatagatgcaaacaaaaccattgtcttatatcatggcaagctgtttttgtgtttttggtctcaacattcatataaactcaatcagtggcaactttttggcttgaatatggccattgttttaatgctgcgtgtattcactgaaaagccttgtcagagtgatttttggggtgggaacaagttgatacgactcggatgactggaggaacaccagggttcttggtctcacgccgataggattaatgacacggacacacatggagtggtttcatggagcgaaaagtttaataggcaagaaagaaggaaggaagaagaaaacagctccccagtatagagacggagggagtggggattggaacaaagagaaaactcgctgtgcggcagcaaagtggctgcttatatgaggagtctggaggaggcggtgtctgatttgcatagggcacaggggattggtttgaccaggcatgtcattcacatagcccgtgaaataactggccctcccaccctagtcttttaatatgcaaatgcagggcgccatgatgttctacacacgtggggttatgtggggcagccatgttgccaggcacttgtgggcaccaggaaaagacagcgggtattgccttgtttgggtggacccagtttctaatggcgtacatttgcatatcaaagcttgccggtgggggcttttctgctaggcaagaaatgtttcttgagctactttaaaagaaacaaaaacttggcaaggaccctttttcgtatctgcctaaaataatttcttattaactcctataacgaagtgaggtttctggccccacggtgaacttttgcttccccaaacttctaaggcaggctccctccttgtgctctaatggacaccacccactcactccctggcagtgtggactactcgtcttttcttgtaaattgtgtctcttgaggctgactgcaagctccctgaaggcaggagagcatcttctgtacctctgtatatctatcctcacactcacagaccactcaacctgttcatgtactcatttcactcattcattcatgtcacaaatattgactgtgacctcctgggttcctggctctgctgtaccacctggagataaagagcaaaacagatgagacagatatctgctttcatgctgcttccattctagtggagtaatacacatcgcaaaggaatggtcatttattgattgagcgtcttttaacaattcttgtcttgaaaattaactgattttagtattcaggaaagtatccaaggaaataagagacatatttttcttctttagttcttttaaataaatttcagaatttttttttaaatgtaagaagttaatgttagaaccctgatactgtatctaaggaaggaggtcgtgtagaagtgtttctctccttttgtgtctttttcatttacaaatgtagggggtagagcttacacttccagagtaatcatcacgtgcaaacgaatgctcattgccaatcagattgcaagtggagtttcacaaatttggtatacaaaggtctatagaaaaattggccaggcacggtggttcacaaatcccagagctttgggaggcagaggcaggaagattgcttgaggccaggagctggagaccagcctgggcaacataccaaagtcctgtctctacaaaaaaaaaaaattaaaaaaaagaaacttagccaagcatggtggcatgtctgcagtcccagctgctcaggaggctgaggcaggaggatcacttgagcccaggagcagtgagtaatgatggcaccactgcactccagcctgggtgacaaagcaagaccccatctctaaaataattctttttaagtattatatgactgatcccaaagaataagttactcaggaaaggaggcagggcgtacttttccagcataagcagcatagatccaaggttgaccacaacagagacaaggaagactatagaagaagatgggacaagacactcacctttgtggagtgtctgctcattatctgctggactctgtgtggggctccccccatacagattatcccctttaatgctcttaacctcactgacacttagccagtattcttcccattctacagaggagagaactgaagctcagagagattaaatagctttcccaaaggcctcttagaaagcttcgttcagggtttgtatctaacttgacagtcctaactacttgagttaggagtcaaacgatatgaattttcagtttcagttccctcagtttactagcaaggaaactaaactgggttactatatttcctaggtcttcctctcctcccctagaaatgagaataataatatctgccatatgagcatgtcaatttttaaaggaaaagctaaatgaaaccattctgtaatccataaagcactctgcgaactataacaattgctgaatgttaagaaatacagaaagtctacaaaagattttctaagaaaatggaaaggaaatgataatcgctgtaatttcatgaaggagaaattgggccaatagctgtcattaattacaaatgataaaacaagaaggaaagcagaatgtcatatcactctcaataaaaaacataggttatgcaaacctgatgcgttccagaagaaatgagaaaagttcctgaaataggattcatttctgaggctcaattccatgattcgttcctatgaatgtgagttataagagctggaaggaaccttccatgaaggatcagggatggggagggttcagagacttgctcagtgccaaagccagagccaagacccagggctgctctgcccagtgtgttctcccttagtgcactagaaatcattctgagtgatgcactccaatgaggggctgggacagagagaggaaggggagaggaccactgttatcaacaaccttccagaagttaatcaaatttatgtcctagaattattttttacagtagaagataaccacatagttatgctaaccacgactgttaaagctaaaagaattctcctgaaagccagtgcttcaccatacacagctaccatgtgcctgattagagctgtggcaagtgtaaataaatcaggggctcaccaatgaaaggactatgttgataaccaaatccattcatcagatgaagaatgctttccatgaaatgaacaactcctgttttcccaatgtgagccagtgttttaacaattgtgtggcttacgtgattggcagtgttcctgtaacaggcagctccaatagcagggcagtctgaataaaggaatctctggaggtgaaggtgctgaagagtgttgatactggaaatgttggggaatgcaagactactccttttgaagaagactggaaggatcgctttgaaatcccggaaggcttgcagacatcctgcagaaaagaactggctaaaaatagcaaaccagcgttgtggtcggctgatagggctgtatagtggaaaagtaaatatccattgctttgtgaactgaggatctctataacctgtatcttctcagaaatatactttctacttcgtccttctttgttttttcagagacagggtcttgttgtatcagccaggctagtcttgaactcctgatcaattaaaatactttccatttctttttttttctcttcctctctctccatattttgttgtgtgacatattcctccaggataatagggaaaaatttaataaaatatttttctaacgccaccattgcaaagcatctgggttgttcatcttcacctccataaacaactcattatcgggagatggttaacttgagcaactccgtaacagattcggttttgaagtcacgttataaaaaacagcctacagtgattgtcacgtacttacagatatgcttagctaatccttacggtattgatgttatccccaatttagaaatggctgagtggagagagattaaagctgccaaggaaaagattaaagcgtagctgtctaacgtctacgagaatgggaaccatggaaaattgaaacctacacataatgcaaacgacttaagccatgagctatctgatttgcccctttctgctctttaatcatgaaggggaagccagcctcgtaattgacaaggaaagtatcagcattccccgcccagccctctgcctctcaggtgctgaggggctcccatcgaaggaggaagcctcacaacttcctttcctattcgctactcaaaccctcatgatgggacatcttattgaatggatcactgaaaagcattttgatgacccatctttatgacatcatattctgtgaatttgtacagatgacttttgttaccatttacttatcactgaaagagagaattgtagtattctgtctcactttttctttcacttttcctttgtatcagcaaaattaattttattaaatctcaatatttaatgtattcagtctacgaaaatcctagcttcttgaaggaaactagtgaaaattcgcagatacactattttctggtaaacttttttagagttgccaaatttttttaaaagtaaaaacatgcaagatttaaattacattgagttaggactgttggatggctggaatctctgaggcatacaagctctattctgctccactttttccactttcagtcactgaagcacttttaggaaggatggaatggaggtactttgtatggcgatgcaagatgaagcaggatctgttacaaattccctggctggaaaagtacacttctttcagcactattgtaccttgacggtctccagttacagccagaggagatgtgtaatatatgactggacttgccgcaaatgcaagtacacaaaccttgggacagagacaccttgtgctacggtaaattgatctgctgctggcgtccactgagtcatccggcacacaaaataggagctcacatcagagatggtgggaactggttggagttctgatttttatctggccattcaagatctgtagaaagagtgaattttaaagtcctctcctgatgattatgctacttttatatttaaaaccatttgacatagaatcaaatttgtgtaccactattttgaaactcattttccaatgtttcctcttagaataatttttttgtcaaatgagaataacatatagcttgcatttttcttaaatggaaatattaagattattcatattattgaggaagattaataagaaagatggcatactaacaactaattgttttgtatgatagttcagaacagcggtagattttgcaaagccaatatcttatgtcatctgccatgtattattgagcatcaaatatatgccacttcaggctgggtgtcccagagatgcatggcatgaaaagatgacagcaggacaataagatatgagcgaagtaaaaaggaaagagaagataagagattactgataaacggtgaagcaaaccattgtatcagctatttctggtgatgtcaatttggtgacatatcctggtgaagtgggttaattgcatgtgtgtgtcaagttgcttcttttctgatgcgggtttgacttttctcattttgactgcttttccagaggtgaaattagagtaaagaaagaaagaaagaaaaacctctacagtcaaaaactggtctaggcagtttatatcacctcacttaattattatcaaatgcttgggaagagataatattattctcattacagagatcatgaaactaaggctcagaaaagtcaaggagtttatttataatcacagaactaggaaatggctaagatggagacttgaatctatgttcatcttgatgaggagcctggtttcatcccacagcacagtcgcccacaactgcaaatgtcatgtactttccgcagcgcctcctatgacagcaaaaagagtaagagttttgggatttctaggcagaacacttatgtaatcaagtatcttagagatatttttcaatctccaagcaagctggggattgaactatgtaagtggtaatgaacgaattctttagaagatgggttaactatgctggttcataaaagaggaaacttgactgcactaaagaaattcatgaaaagagttctgattcttcctgagttcccagtgtcccttgttctaagagagctatgcaaatactacactgatgcctggaatcatctataatttaaagagttacaaagcttttcttctgccctatgctttggttttgtgaagatttttgtacatcaaatgctgcatctgtggactcattccagttacatgtatatattatacagatcatttgtgcatccattgtgatgtactgggtgaacatacgtggaaactgtaaatcttcatgaacatctacatcatcattagagaagttctactcattaggctctcagcacagaatagtccaattcaattagaacacttcttcagtgagagtttaataatgagactattttcggtgctgtgaccgtgatataaggcaaatgcaagagctattgtaggggctctgctcccaccctaggctggaagaggtgagtggaaacagagctacgcaaatgtctctctaatatgagccatgggggccaccgtgaggccgtggtgacctcttggggaagggctgggtgaataaagaaccctacttcagttttctctcacccttcattggccaactcaacttgaagccagagggtagatgcatctgttgacaccatctgtaaagatcagtcagttgggcactggcggaaaagatggagagtgacctggagggacaaagagaagccatttagcacatcagtatgagagaaattactcgtaaacaatttaaaccaaagtattttctcatacataacgtttctttctccagctctgtaaccatgaaaacgtacgaacaaaaaaaagttagttgtattatctgctaacagaatcaaatagcatgtcaaatttgggaaattactaatttaatttctgcaaacaacctttataagattttttacattcaaagaaatgttggtgattagtgaatctgtgaaaacatcttaggtattgtctttttttctaacaagtattttgagtttgtttgatgcctagtaaacactggttgagtaaatacccaatgtattgcaaataagctatactgttagaatgtgtctcagctgctttcccggaacatcacatttctcctttatttccgttatgaaactaagaattttattttgtctgccatattcataatacatggaagtcttgacccgttctatcgttgacagtcagggtttctcaatctgagtggaaaaaacacaaactgtttttcctctgctctcacaccacgacaatcaacacagaagacttcagtgaccaaatgtcagggaggttttccccactcatcaagcagcagacaccagtagggtgtcccccagttcagtaccattctgatgctgtctacctgaaaatagtgtcagatcccgcaggttgaaggttcagtcccaagtctgcctctccccaatttttgataccagtcgcaaaccccaggttgaataacctgtgcttctgaccggctggctatagctggggttcccatgtcccccttcttaggtttgattaatttactagagtggctcacatgactcagggaaacatttgctgttttattataaaggatattatgggccagcagtggtggctcatgcctataatcccagcaggttgggaggccgaggcaggtggatccctcgaggacaggagttcaataccagcctggacaacatggcgaaaccttgtctctataaaaaacacaaaagatgagctaggcatggtggcttgcacctatagtcccagctactcaggaggctgaggtgagaggatcccttgagcccgggaggcggaggttacagtgagctgagatcgtgccactgcactccagcctgggcaacagagttagaccctgtttcaaagaaatgaaaaggatacaaaggatacagatgaagagacgcacagggcagggtatgagggaaggggtgcggagcttctgtgccttccctgccacaccgccctccaggaaactccatgtattcagctctccagaagcttcccaaaccctgtcctcagggactttatagagtatttgttagataggcgtgattaattaaaccattggccattggtgatccacttaaccttcagcccctctaccctcccatgaggttggggtggggccaaaagtcccaaccctctaatcctggcttggtctttctggtacccagccccatcctgtagctacctgggagctgccagccatgagtcagctcattagcatacgaaaagacagccctttgcagattctaaggatttgacgagttgtatagtcaacctgtgcactgttactatttggggccacataattctttgttgggggaggtgggggctgcctgtgcactgtagcatgtttaatagcatcgctctcctctacagaccaggtgccagttctcacctccctagttgtgacaatcaaaaatgtctccagacacagaaaatgtcccctgggaagtaaaattgccaccattgagaagcactgttgaaaatgaatgtgctgggagtgtcgtatcttgggcgtcaaattctctattcacaaaccagtcctctttttataccaggccacttcaagaatccagctattgagtcagttggctaatgtgatcgattctgtgataatcattagtaatgaattggctcactatgcttcacaggcaggtgactgggtggtttgcactcaaaagcaactgtgggcgtgacaggcactgagactgacatgtccagaataactctgcaagccatgctcccacctctaacttctggttgctgcctggtgggacagccatatccatacaatagtttttagatgaaaacagaccaaagaacatctgaggcccctggttttcttagtttcaatgattttggatcaaagtccaccatcttctacctggactctgaaattcctcctaattcagtcttcttgcatccattcttgtttccctccggtccatgactcatactgcaccctgagtggccctctaatttcctccagttggaaacccttcagtatcttcctgacccacttgaccctattgtgatctcgcttctccttacttatccacctgccatttccctctctgctttcttcctatacaagttcatacagatcgttgatgaccacgggccctttgcttatgctgcttcttcctccagcctccttatgtctggttaacaccacagtcttcagtttccaggtcaaatattacttcacctacaaaccttcttattgcaagatcccaaatcttcaaaattaccagggttaggtttttttgtgttacttaaccttcttagagagctacgttcctttaatccagagcacttatcttgctttgcaatcatacattcagtagagtgagtattaatatctctccttcattaaacttaatgctgggggtggggggcagaaggacctgttaattttcttcttaccagtacaagtgtagcacatagggaattcccaataaatatttttgggagaaaggaagaaaggacaaaagagaaggaaagagggaaggaaatgagagaaatgtagaaaggaaaagcagaaaaatagatgtcaaacgtctgcagtgtgactgcagcaaaacctgtttgtatgtactctcctggtcctccccaggctaccctcgtagttagctttttcctctagagcacaatgctttttccatgccatcagaatgaccttcagagctgattactatttaggtttctggccaacaggtaaaatgttcccaagaccttcattttaggaaaatgcttttcaaggcattagaggaaacatgtgagtctatggcagtgcccttggagggaggcttctatgagataaaactgaggacagtaaaagttgcttcaaaaacaaatgctccattcagttccattcgggtctctttattaaagtcatcgtccacttcttacacacaaatgctgctgaaagcagtataaaggccgaaaaaagttttaaaataacatgagaaaatgagcagtgagtggtatgagtgaccttggtccacagatcatcctttcagatgaaagccttttgttttccctaaagtccttcacattagtctttagtgtcgtcattcattacacagtctatcttcatttacaatccatttgccacacgtcaccactgaaggagatggaaaaaatccattagacataacccaggctttctcccaccagcagggatcaaacgaccccataaagtcatttcctattaattacaaattgattgtgtataaacatttcagcactatttttcagatgataataaatgagttgtgactggttacagaggttagataaagatgccgagacaggaagagggcaagggccgtgcagggaatgaaaacaaagctgcctgatggtcaggcctcgtggtatttgtaaacgtcaattggtcaggagtgatggatgcatttcagaaacctcaaaacccaaaaaatgcataatgttaacttcatagattctttcaggcctgggttaccacagtatttacaatgaacgtgcgttcacggtaataacataatagtacctttcagccccaaatcccagatatttgcacctttataaactgttaaattctaagccaatggtgaataacattccggtatgtacctatagaacttgttatgaaacatgattgagtagcaactctgtaggctagattataaaagtatatttttatgagggtgaaataatgaaaacagtctgtacataaaaattataccagaatgaggaaatgctactgtaacaaattacttaactgagatttactgaggcaagagtcagtgcaagtatacacgattagtggggtttttgtttcagaacttgaaaggagagaaaatatacttatttctaactttcctagagaaaaaatgaaaaatatagtgttgttttctatttttcagtttttgagtttgtttatagatggttgtggcaacattggcaaagctagagcaagctagttattgtccacagtgaaaataacccaggtatagaatcatggaatttcagactgaagagtgagtactttaaaacatacttgttttggtactcaaaatttcttatttttaagctttgtgtgtcaataactgaacatatttgaaggtttgtgctctgaaacccttcagaaaggtgtatggtcttatgaagcactactggattaaaattcagagtgatctagagctaaccatgtcccacatggggatgttataaagattaaattatgttttctacatcaacattttagatattggatcttcagagctcaaaaacaaatttattttcctgggattacattcagactaaaccattgcaatgaatgagtctttgaagagtcattcatacatcctaaaatccagaataatgagaatctcttctagttttaaaatctcaaagagagacattcctggtgttacaatgtcatttgctctaactcctgtcttgctaacaataaccaactagtcaccatcctcttcagaatctggtttaattaaatccccaagaagaaacgaaatgagaaaatgtttaataggaagtgacttcttcagtcttaccgtttaacacaatcattgcgatcagagaaaacagtcagtttgaactgaattctatttgattgtattggtttagactcgtctcgaaagaatcactcagcgaatcctttggtaaaatcttttttaaaagttcagatgttggtctgtcaggtcaacctaaatcaaggtatggtaacattttttaaaggtttggacagaatgagcctcaatggtaatattttattggatgccatctggtaaaaactggttttatttggttaatgtttatttgttccataaaaagataggctaatcatgactctgttttatataatgcttgtttatgtaacaggacataaccatgcagtgggtcccaggaacattattatatttggttgcttctgttttcccaaatagatgaaagaagcaaaacatccttgtgcatttttaaagttgctggtagcttttgaactgccgttcagatggaatcaatttcagcacagcaagacattttttaatgcaaccctgcagcactttagcaaatgaaaactattttccatgagtcattctttgaattacaaaatgttcatcatccaggagtgtttattgcacccataaaactaatgcagcacaataatgggtgttaatgtcagcagtatccggctgtttattatgtaacattcgaaacgggaaggtgagtgtttaatgctattgtttgttgtctaacagttccaattgttcataccatcaggtgcttagacagcagatcaaatattttgcttgatgttctccagagcaaaaaatgtaagtttacttttctttataattagcatggtgaaatggagggctaacaaagaagctgccaggatctcaaggtaattatgattttttgtttagtgacagcttcttgttttgaataccctttcccttttctcctactatgacaaaatagaaactcttttttttttttttttttttttttttgagatggagtttcgttcttgttgcccaggctgcagtgcagtggcatgatctcggctcactgcaacctccacctcctgggtgcaagcgattctcctgcctcagccacctgagtagctgggattacaggtgcccaccaccacagccagctaatttttgtatttttagtagagacggggtttcaccatgttggccaggctggtctcgaactcctgacctcagatgatccacccgcctcggccttccaaagtgctgcgattacaggcatgagccaccatgcccggcctagcattatctatctttaatagcaaacatttgaaaataatgagtgccaaacaataagagatgcttcaaataaattacctatattttgtcacctgtacgaggctagctacacaccactgagaaaagaaagaagcactgctaattaaaaactacacttactgaaagagttttttagggttatttaaacatgcattttgtgcatacatgaaaatgaaaaataagtgaaataattggttagattattttcaatgtttttctcctacaaagtccagctcttctgagtcacttttcaattgtgaatcatcaaagtccatgtttttccataagtatttctctgtgccatggagagcactagtgatgtggcatttcttatctgtgccctgcagccatctctgggatcttcctgcaagttgctcacaaactgttctgtgaatgttgatgctaattgcttcttgatctaataatgtgtcaataagaggttttcagaacccagccaggtcttctattttttctgcaagagatccttgtcatctgtggacctgacataaatgagttacagttgcccagttgtgccactgaaactataaccatattaagcccctgcaggcagtgaccagtctgtcaccgctgccacctggccaacgtgacagcaaatgtcagttgtccttgatcttgagatacatcccgacttagatgttaaaatgtgtatcttagaaccattaaagtgcggttaagtgtatccaccaagagggaaacttgcgcactcaaggagaaaatcaggctgggcgtggtggctcatgcttataatcccaggactttgagaggctggggtgggaagactgagcccaggagttcaagaccagcctgagcaatatagtgagactccacctatacaaaaaataaaaaaaattagccaggcatggtggtgcacacctgtagctccagctactcaggaggctgaggcaagaagatcacttgaacccaggaggtcaaggctgcagtgagccatgatcatgccactgcactccagcctgggtgacagagcgagactctgtctcgaaaagaaaagaaaatcatcataattttgaagcctcttggacagtttttatcagacatatgagataagtttatgttataagacaataaaggaaatgtagctcagtagaaagggcataaacttgtttgtaaacttggacaagctacttatctaatctctctagagtctttattttataaagggtaaaatggaagttgttaacacctgctttgtgaggttattctgaatattaaatgactcaatgcataatagttttagtattttccaagggaagttttttttttttaaaaaatcaaacaccgcattgtatataagaaacgagtcctactctgaaaccacgcacctgagaaaagtctggaagggaatttggataatgttaaattctgatttactgatgtagagaaattataaatattttatttctcatatataatacagtctgtgatacctgtttatatctgcatctttgtatacccacaggatttaggttatagaataaaagttgcagtcagatgtgctggctcatgcctgccatctcggcgactcaggaggctgaggtgggaggcggttgagctaaggaggctgaggtgggaggaggttgagctaaggaggctgagcctgcagtgagccatgattgagccactgaacgccagcctgggaaagagagtgagacccagactcaaaaaacaaacaaacacataaatgaataataaaagtttcataccagaagccatgatcttcaagctctatctgtgttctgaatatgaggcaagagagaagggaggacaggagaggaatggggagaaagtctccagagttgggagtattgatggaaatggagaggataaaatgaagtcaacttcataaaggggttttgaaggatagcaaggcttctttgttacaaaatcagcatttcttttcagtaagagatagaaacacaggaaacgcattgaaaatggagtagggtgtggccaggcccttctcgtcagtgggaaccatagcattttataaatatatgcatagggcacacattgtactccagtgctattacttgtagtgtcctttattctgcaggacacagggtcatttgtggcaaagagcacagttgcagagccaccttggcctggctggaatttgggctgaatcacatactaggtgtgtcttaacatttcctttcattagatcttgaacagtgtcagacacacagccaggcatgacattgaagggaatatatttcttttctttttttttttttttttttctgagatggagtctagctctgtcacccaagctggagtgcagtggagcgatctcagctcacttcaacctccgcctcccgggttcaagcaattctcctgcctcatcctcctgagtagctgggattacaggcacctgccaccatgcctggcaaattttttctctttgaataatatttctctttgtagaaaaagaaatgcagcagaaaaatcaactgtgtcaaatattgctatgagtgaacatttctttgcatgttttcctagtttagagttcttgaccaaagttttcacaagttatattgagtggcagtgaaacaatgtcttcacagaagccctcataattcttcagaatctttggctacatttatgcgatgataaagcaatgcttgaaagatttttaatgcaatgactttattttttcttttttttacccttttatttatttatcttaatttatataaatttaagaagtacgagtgtaattttgtcatgtggatatattgtgtagcggtgaagtctgggcttttggtagatccatcacccagataatgtacattgtccccattaagtcatctttcatcatccaccccctccccacatacccctagcccttctgagtctccaatgcttgtcattctacgtctatgcttacacattatttagctcccacttacaagtgagaacataaagtatttgacgttttgagttgtttcacttaaggtaatgacctccagttccattcattatgctgcaaaaaacataatttcattttttatggctgaataggattccattgtatatataccacattttctttattcagtcatctgttgatggacacttaggttgattccatatctttgccattgtgagtactgctacagtaaacacatgagtgcagatgtctttttgatataacgacttcttttcctatgggtagaaacccagtggtgggattgttggattcatacaaatataccaaatttattttttcttttcctttgggtagaaacccagtagtgggattgttgaatttatataaatatacaaaatttatttttatatatgtattatataaaaatacatgtatataaagtacatgtataatgcatatattcatatatttttatatgttatgcaagggttatattttagagccttatggtttcatgttttatggctcaacctatctgttttgtgtcttgatagaacagagcctccatcattgtgggtctcctatatcttactctcctgagatgaactcctttgctctaaaagtttttactagtttatagaaatatttacaaaaattcatttggttaaggactcattcatttcagaggtctagaagattgtctcctgaggaaacacagtacagcttcagaatcattactcggcgatccctttgagcgcttctctgagtttactcgacagacagattcattttccaacaaaccctttctaagcgttttgatttagcaatcagaagtcagagggaacgtggcacttttttttttcattgagaataggcctgtttcaattatatttcaaatatttaaatagtttttgtgatgtctttgggtgactttctatacctcgagtggccatttactaacatatatatacatgtatatatatgtgtatatatatatatttgtgtgtatacaaatatatatatatatatatatatatatatatatatatatatatatagcctttgcatgggttcactagtagttcatttcagaccataatttatctatagatgaaataaaaaacaggttttctttttattaagttagatgggagccaggtcaggtaggaagttggttcttgagaatagaatgtgtgtgaagcagctcatcaagaagaagaaagcaaaagcaatatcctgagaatgcgcttgttttgggagaatgtgcatggtagtggtgaggagctcagcatggctctgcccgatgacctctccaggtcggttttccacagttgcctctcaaatgtccttaaatgtttaattacaccttatactaagctatgttgggaacacaattctgggattgtttcaattctcttaaaggcagacaattgtgtatatggttatgtttaccaagacaaagcataggtctaatgaatctttaaaaaccaaaggcacatttgtacaaggagaagattggaaatgacttaaactgaattgtgcaatttaaatacacgcacaggaaggagagagggaaggagggagagagagtgcatgtgcttagctaagagttccgtatctatacctataataacatctatatccttgtattttccactaaagaactgaggtagcttaacttaccaataaaacctcggaaactaaaatcacattatacataaggataatatgtgattttaaagaaaatatccatcatcaagaaacaaaataaaaagaggcaagaagcaaagctctccagaaaaacagctaaacataaacatccaggccacaaaatgtgtttcttcatggccaaagttaaaatggaaacatgacaattatgttataaagacggtaaataacacctcctcaggagaaccgagctttttctacctcatagctctaaaataaatttcttatatggaattttacattaaagtgctctaaacgagtttcttactataaaagctaacattataataccaaaaggtaacccagcgaaaacatttaaggtggacagacagactagcagggtagcaaggaaatttggccgaacatcctctattccatggttcgacttcaaccaacaagacaagtgagcatatgatggaatagatggacaacaaatcttcccaatcattcctcttttttttttttttttgttatgatggagttttgctctgtcacccaggctggagtgcagtggcaccatctcagctcactgcaacctctgcctccaaggttcaagctggtctcctgcctcagcctcctgagtagctgggattacaggctcgcaccaccacaccctgctaatttctttttttaattttatttttagtagacacggggtttcgccatgttggccaagctggtcttgaactcctgacctcaggtgatccgcctgccttggcctcccaaagtgctgggattacaggcgtgaggcactgcgcccggcctcttcccaataattcctccctaaatatcacttctcccaaatggggacttggggtataatgagcaaaagattcatttattagaagaaagatctttgtcttttcgtatagatagaataccatattcacatgtattagagtcatgcatatagtccgagatacgtatggaatcatataaacagtgggcaggtgtcattcatttattcattcacgggcactgcattgtagagtgctgcgttaggtattttcttaagctatgtttatgaatagtaaatttacagatgatttcagtatgtgtttatttcataccaaaagttggtcctgctaaaaatgattttaaatgttttggttttgacccaaatatcttaagtatctctaattaacttcctaatgtctgtagagagggtttatttaaaaaactttgagaaataaataaaattttcccagttttggatagagtggcatattaaatctggagatgcataaagcaaatcattacttataaaaataaacaggccaggcgtggtggctcaggcctataatcccagcactttgggaggatgaggcaggcagatcacctgaggtcaggagtttgagaccagcctgagcaacaaggagaaaccctgtctctactaaaaatacgaaattacccaggcatggtggtgcatgccagtagtcccagctactcaggaggctgaggcaggagaatcacttgaacccaggaggcggaggttgcagtgagctgagattgtgccactgcactccagcctgggccacagagcgagactccgtctcaaaaaaaaaatgggagtggaccacatggtgtgacctgccccagttgagcactgccctaaaatagtttggatggtcacttggtgctcacacagagtatgagaaggaggcagagggtcctctctttgctgggcccagaggagattgtgttgattctcatgacagcagggcacttatttttgtttgaagggccctgactaccttatttgtcttgcagttgttccctttgacttggaaattcatattgggtcactacttagttcataaacacacctacaaaaagacagaagaggccgggcctagtagctcatgtgtgtaatcccagtgctttgggaggctgaggtgggaggattgcttgaggccaagagtacaagaccagcctgggcaacttagtaagaccgcacctgtagaaaaacatattttaaaatgtattaaagagagagaagaaacaatgacaacctaattcaaactcaaatgttaaccattttgataggtgtatcattatgcttcagaaatggaataccgttatgactgttatgtttgttttaggaagggaatactgttttgctctaaattccagcatttgcaagtgagagtcatttttcagagccaaaacattttagtagacctctgtataaaaataatacagcttttagtatctcttgagaagataaaacactaccataaatagtatatttaagtagttttccatacacccttaaatgattgttacatacacaaatctgtacatttacatgtattgtatatgtttatatttgtatagatataaaaatgagctcactttagccattatttgatgaaccctgtgtttccctggggttttttggcccccagcttggggaagcctgctccactggagtaagacagactacttcagatggtctggtaggctggcactgtttctttctttctttctttcttttttttttttgacagagtttcactcttgttgcccaggctggagtgcagtggtgcaatcttggctcactgcaacctctgcctcccaggttcaagcgattgtcctgcctcagcttcccgagtagctgggactataggcatgcgccaccacgcctggctaattttgtatttttagtagagacaaggtttctccatgttggtcaggctggtctcgaacccccgacctcaggtgatccacctgcctcagcctcccaaagtgctgggattacaggcatgagccactgcgcccggcctatttcttttacccttggaggtagttgcacttctcacttggttcagtctcgtttgatgtcctgagctttgccataactccctgggaaactgcttatttttatactttctcttttattttagtctcttgaaatatcaaataccacaataccaaaatcagatgtacggttgcctcacataacccttgatgtttataagttgcttttgtcattgtgcggcatgcactgttatttatctaatcagcatttcagggaaacaccaagtcagaggaactttcttcctgttcctaaccgcctttgagatattacatacaggccaagtaccacaggcagggaggctttttaccgttcttacagagaggcaggtgtctctccacagtccaaagcctgaagaggccactgccacccagtaagatgattcttctgtccagctttcaagtccatccactacccctggagtaaggtgggacacaccttcaatgaacttagatcttcctcccagcctctgtccccatttctaaagtgcacaaatacatagtcccaatcctgtgacgttccttcccgcacacagacgaagatcctgctgctcttatactgtaagggtggtagacattaggcaggtctttttctctcagaaaccatgttcacagttaattaataagattatacatccataagttaaatttagaaaactgaagtcatgataagagaccacagttctcaggtaagtaaaattcctatctcaaagtagttttaaatgaatgtacggtggtttctagattaaaaaataataataattatgcaattgccaagagagtaaatttccagaggaatgggtatttttgctgtataagtattcttggagggcaaataagaccgaatctacaggccactagttttctaagtcaagtatgatcttaacagaatgccacagtaattatcctgtagttctctgcatgctctgttgattttaatacttttgataacttccattcagtagttcccttgaacatgaatcctttacaaccaaagccaggtttgtaagtttcaaggttatcgtgcaatctgaaactcggaaagatcatcacagggtccttacagctacccacataggccattccatcgttatcctggcttaatgaattatcagtccaaatgcaaagacatagcctgaagagaatacatggaactcaattatttcattatttaacgaatgcattccaaaaaaacatatctggcggtggcaggggggagagctagacaagcaggtatcagagggacccctctttttgaggggaaaggaattttgaaggctctgtactgaccagaaacttggccttccccacaatgttgttccagatagtcatgggtgacttcttcctactggcctcatgtatccacatgtcaagccaaagtggagagaaaagaaatgtatgaatcatgatgatattggtaataatagaacctcctacaacttactgagtatctgtcaggcactatgtcacatgctttacatttattatctctaaacctcacactaatcttaaagagcccaagatttttctcaattagccatgaaacattttgactttaaaatctacagatatcaaatcatttcctatggcatgcccccccaaaatcactataaaatataaagctgtgttttaggtcttttagttgtgtttctttcagtgctttagtagaaataatgatggctgatatttgttacatgcatattttgctccgggaaggcaccccctgagaaccttccatggacttaatactcacagcaccccatggaatcagtgcttttagttttctcagttcacagatgaggaacctagacttagttaagtgacttctgtgaaggcatgcctgtggcaaagccaggttccaactcagcgattatgacgtcagaacagagcttttatttactttgccatagaattaacatcacggttgggaatattggatgaatcccagtgcagctaaaccaactgctgtcagcagaggtgaactgaggtaatatacaaaatcgataacacaggaaatgttctagcagctttagcaagatccagaaagcaatcaggactgaacatgcatgttgctcctttctttttcttttttttttttttttaagtaaaaacaccatttttatctctaacctcttcctcacacagaggctatagaattccccatgtaagtttttgccccatcctctctccagaccaattattgaagttagtcttcccaagatgacaactgatcaaaagattcatgtaataaaactctaatttcataataaggatttttcacaatttgaaaatgccctcaccttaagatgttgaggaacttggttcagttacttcacaggccatttactctccaactgcacagctggaattgcttccttttcaatttcagccttctgaaagatggtctttccatattgtccttaataactattttagaccctacagcctctaatattttaattaattcttactcatcctaatatactagaaaatatataaataaaaaatttaaaattgtcattgtgtcttcaagtattaaaagtaggactcagaaactgaactttaaaaaagtaatatttcaaagtgatattttcttcagcagtgatatcacaagaaacatttttaacccagattttgaagaatggatagaagtatactaatatgcttttaaaatactatttcctgctgtaattcacaaagaagagaacaaactaatcaagtaatagttctgatttatcaataatctacttaatagccttttttatagtagatctttcttatgatttctatactttatttttactaaggggctgctatttcatattttataaaacagaagactcaacagaaattaagttaaattaaattaacagaaagcctgctttttaaccacaaaactcaggtttcaaatgatttggttacatgaattttctgaccaacttaactttagctttaatagcttgttagtttcagtacttgtcttcataagacttgtccagtaaattcacatatattttgctctgctaaggagcttgtaattcattgttcgaaaccctgataattatttcaacatttgccttaatgagaataatttagcaaatataaatttatctttgtatgctaatcaaagatattataattcattgtaagaaattccaattgttaaaagctctatagacatgagtatttgggtgattagtataaatatagaataacccccaaacagccccttgatatttttaaaatatttctgccataagtttattttattataaattttcctcttcggccaggcgtggtagctcacacctgtaatctcagcaccttaggaggccgaggcgggcgcatcacctgaggttgggagtttgagattagcctgaccaccatggagaaaccccgtttctactaaaaatacaaaaaattagccgaccgtggtggcacatgcctgtaatcccagccactcatgaggctgaggcaggagatcgcttgaacccaggaggtagaggtttcggtgagccgagattgtgccattgcactccagcctgggcaacaagagtgaaactccatctcaattaaaaaaaaaaaattcttcttcaacattttgggtaaggcaaggagaaaaatcaaatttggaaacatagtctacacagtatatgtattccgaaaagatagatataaattgaattttgtaaatggcatcataatttaaaactgactaacaaaatactggtgctaattctttaggaaaagaaataaatgcaacctagtttatctaccttgtttcatgcaattgagattgcaaatgttagatatgtgcaaaatgaggtcagtctttacacagaaagagatagctgtccataaacaatgttttagacaacttgataattgcactgccttttggactatccttgggctgtagattaaaagcagtctgtagttttagtgactgaatcagattcttggtctgaaatataattctctctgtctctctctctctctgtttccctgtctccctctccctccctctctctctcccactcatacgtacaaatacacaaagtatttcagtaaattgtaggcagtttcttccaactcatctaatcacacattttgcaaatagaaaaatattgggtatgtaattcacatttgtcttggtatcactgcctttgctatattttttgaattttttttctctctctatataacctgttttcatctgttcttggttttgtcctaaattatttcacaattaatgagaaatgggattctatcactttgcaaataaccatctctataacctagtagtcttcattattttatgcatggaatgtttttaggtatgacttacagagctggcttctttgatcttcatataaatccaagttgagttctctttgataagagaactgggacttgtacttgactggagaaagtcccgttgttaacctaaaggctgtgtggttcactgctgggtgtcagtatggaacgggtagctctattatttctcacaagttaggatctagccaatttaatattttactctcaagtatagtaacttatttgtcctatgtacttcactgcctttttacttatgaacgattgtctgcctctaaatttcttttagctatcttctcctttcttccccttcttctttttatttttagagatgggttcttactatattgcctgagctggagtgcagtggctattcacaggtgtgatcatagcacacgacaatctgaaactcctgggctcagagatcttccttcctcagcctccttagtagttgagactacagatgtgtgccaccatgtgcagctgtctcctcctttctagtgccgttgcctctatcttagatcaacccttacctgttttcctccaggctgtggccacagcctaactcattttcatatttccaactttacccccttctaataagtcttccatggcgtccagtatggtaaccatttgctgagtgcttatgactgtaaagaacgtgcgaagcctgaaggtataatactcgttgggctctactgtaacacttggctcccccaaacacaagtctacttattcagatacaatttgttaaggagagctctttatttttccaactctggatatcaagcccttgactcaactagacaatcttggctctgggagtgcctgggcatgttgcgtagttggttgttaggtgggtttaaactcagtgctgagtatgcctgtcagggtcccagcctctggggaggctgaggggggaggatcgcttaaacccaggaggctgcagggatccatgatcacgccaccgcattccaccctgggtgaaagagtgagaccctgtctcttaaaaaaaataaaaataaactcgctacttcacaaaatgaaaaagattttcgagaacgacagaatctacactctaaaataaaaaatatgtccaaatccctgtgcacacttaaacacagagaacgggtcctgatgacagtcaccaattcttcgagaccttaaccatctgactaaggagtagcctctgcctgtcccagcttggattatccgctgtgtgtcccaaatgctgttatctagaccggacctggtgcttcttacctccagccattgcctgtgaatgctgggaggggctgtaccgggcagcaccatctctttctcctgtgagcactctgtcagaggctgccctgattcctgtctcctttgttccagatcaggctgctctgaaaattagtattgcctctgcacactgtgatcatggaagagattttaggttccttgcttgaagtatgagcttaaaaaaaaaaatctctcattgaaccaaagcatgataggttttgtgtagttccattaacatcccctaggcaagagtggatcaggatgttgccattaaacacgtcatccacaatatcgtgtgggttatactagcataatcgccttttagatttatgctctgtgcacctttattaaatctcaccatgccttggcctctacagtgaagctcacggtatccaaataacattctctgctttttctaaagatttgggtattacctcctgctaaactgacgccctctccataccactctgcattttatttctattacttcttcaatttttttcccagaggtaaagacaagcaataaggctgagatgcaaatcaacgtagccgctagttagtttcatttgcgttttggtagtcattattttgttcttattttgccacccgttactgactaaccccaagcaacactgcctccaaaaacacgagcaatgattcttgatgtttttattttcctcacccagtctttcatcgtccagtgaatagagtgtgattgatttaacttctaaatatatgtttgggaaattttccctttcttttcttccttacagacatggtgctagtttgagcctttcttatttttgacatcaactgtcaaactttctttctagtttccctgcttatgtcccctaccgttcatttcccctccacttaattgctagaatgatccatttagaatatgtcttaaaattgtcaatggcttaatatgtgaatgagtttctttggctatcacacaatcttgccctttcagcttgttttgccttcaggcagtaatgggatgtcaatcagaaaacagtcattaaaggcacaagtttatttagacgtcaaaaagtggttggattatagtcactttgcttagatggaatgttagcccctgctgtggagctatccaactcctgagcttttttgtttgtttgagacggggtcttgctctgttgcccaggctagagtgcagtggcatgatcttggctcactgcaacctttgcttcctgggttcaaatgattcttgtgtctcagcctccctagtagctgggattacaggcacctgccaccacatcctgctaaatttttttttttgagtggagacagggtttcaccatgttggccaggctggtcttgaactcctgacctcaggtaatctgcctgcctcggcctcccaaagtgctgggattacaggcgtgagccactgcacccagcctaactccttagctttttgaacgccctctcgtgctggtttgaaccttagccatctgtgttccgtgactttctatacctgttgtaggctgtggagcatacctgtttcagactgcagtagttatggttgtgtcagggcctaggagaaattttcccttcaccctctgaaggttcgctgaaaaatcaactcacaaaaggcagattcatttgagaaaagatgtacaaattttcttaatgtgtacataggagccttcagattgaagacccaaagatacaggggaaactgtccatttttatgcttaggtttaacaaagtatgggcagctgtgtaggcataggattggacgaaagggtgtggtctaatgcgaatagactgagtggggacacccagcaaggcctgtctgtccagattcttgctggcctctctggtcagctttccttccttctggtgtggggtggggccctctctggaatcggatctcatacctacactcaaacaaggtgggtcagagagtgtctttatcgccagttcttacccagaaaggcggagcgaaagttagagtaatacttttaggttttaaggctggctctggggcaaaggggttgtggttactgtgacggtcctggaggaagagggattctggtttctatatctggcctcaggggagaattgggctgaggaaccggaaggcagaagtgagcagagagaagctcttgcttctgaggctgtcatctggggtactgtttcctgagcctccgcaattgctgcagatgctgcagcttttccagtagctcagtaatacaaccaatcactgacgtgctttgtaatacaaccaatcactgacatgtgcttttttttttttttttggccatgtgtaagcagcatttgtaatttagggcaggtatcactggcatcactgggaaacttgagggcaacgcaccacccagtggcttggcttttcccagtggagcctcctccaccaagaactctctgcagaggacatggctctttgttaggggcacacaccaggggccacagagcaccccctgccaatcatcctgttacactacacagtagttctgtgtttagaaaagagcagtgaattgaaataagaagtaaggaatttccatatgtcaaaacccagttactagctgtttgtttatttatttattttgagacagagctttgctcttgtcacccaggttggagtgcagtggcgcgatcttggctcactgcaacctctgcctcccggattcaggggattctcctgcctcagcctcccgtgtagctgggattacaggcgtgcaccaacaaacccagctaatttttgcatttttagtagagacggggtttcaccatgttggtcaggctggtcttgaactcctgatctcaggtgatccacctgcctcggcctcccaaagtgctggcattacaggcgtcagccatctcgcctggccaacatgtctaaatcctttctctgaggatttgtatctaattcagaacccgtcaatgccaaaaattaccccttttctttaagtgcatttctttatgcatgaatccatttcagtctgtctttcctacctatttcccatgacaaattccaaaatgaaattgctgtggaatccactggagtatttgttatatacaagttggttaagtgagattctttggcctaatccggagctttttttggcctatgagcatttgatccttgttcagagctggataattgtggtcaatgggatttctactcaatgagatttcaaactccatcactctcatacactcccttttcctggtccttactgatcattctctctggctaattttaatccaaatgaaattctgtgctgagaatttgggaccaaacttttccgataataatattttcaaaagaaaacaatgaagggattggccagaattatttgaaaattaaattctttcaggaaaactataatttgcccacattttacttctctgaaaaagaaattgttaatgttacagtgtgacaaagtcactgttcttcaagtttcttattgttgaggcaaagttctcagagaagaaccctagtccttcattctcagctgacctgtccgggccaatcagcagaaagtactgtctaggaccacagacactgagacctgactctgagcaagaaggcagccgggcactgggcccggtgcacccgggatcctggcgggggtgatgccactgccatgcagcaccaggtgtcgcccgggcgccatgaccgctgcatctgctgcagcagaacggatgctcacgccgctgccactttcctccactgccctcacctccttggcttattcattcccactggagatctgaacctaagtcgagcttcggttatgaggacaagggaagacttacctggtcttcttggattctgtgttgggatggatcaatagagtagaagtttggatggtagggaattacgcaaacatacagacaaggagttcaggaggtgctgtgacaccaaaacaagtcctctgtaccttggccctgacttagttcactgctgttgcttcagtggcatcagggcttgccctgtcactcataagagaggtaggctgagaatgagaattttggcccccggtgggcctatcgtcctaattcattcttctttcttgtctgtgtcatggattcttagaagcacacaactagtaaatcacatgttttcaagtctaaaattaaagtaagtgtgcaaagccatgtgatcagatgaaggggtcattaaaacactgatgcctggccatacatggcagcatggacatgggcccagccggggtgtcaggaggcatccccggctcagtcactggctccccgtgtgatcatgcccctcctgtctgtgcttcaggaaagtgctaggctccgaggagctggtctccaggcctccttcattctctgagagtctgtgattttcaagtcacagtgatgtttgctgagggagtgggttgcatcatctgggatgatggtgtgttttgttcttttgtggggactgaggtggcagctctctttggcataagctgagctgtgtcagcgcaatggagctgattggctgaacctcaaaagcagaccccagagagatattgattctgacagtgcagcaattacagggaggcactggtgccttgcgaggtaagacatctgggtgcttgtgacacggctggtcaagtcttcagtgtaacatgtgatgtaattggtatggacagaggggctctgggttcagaccattcttaaaaggaactggagattatgtctgtaaaactgaaaacctacacagaaattttcaaatcgatttttatttttgatgattactactaataaaaatgactatctctgtttatttttttttttacttctgaagccaaccaatttgttggaaaatcagtcaaaatctaattttgatgttctgcaagttccctgggggccatgaagcacctggtgagtctcacgcccacttttccccaacacctgccaacattttcttctgtgtttgatccttttgctcttgtctttttcatatttttccttcaatatgttcccataatgtctttgctcttttaaaacatgcatatttctgtggttctattgaaagaaaccggaatattttaccctaaaatatgcttctttggcatatttcgagatcggtattcagaggggctggagaacacaggaatagctctgaaaagctgtcctttgtgaggcagatttgcatctgtagggaaaatctgcattcgggaggtagacagaccatgcagacaggctccgaggcacccttgtcttcctcatccggatctaggaaaggttaactcatgggaaaaaaaggctaaagtctgacgctgctgaaggtctgatagagacttttaccccattcccatctgctcttcctgagggcagctccagggttataggagagttttatccacataacaagacaccgtttgctcaccaggcttacctgccttcactctcccataaccttgttgcctcctcccccggggaacccctagcccctgttccttccatcgcctggaatggaagatagtctaaaaacttcagtcagctgacccttttttgagtctcatgtttgtgggactcccatgtccatgggcatgttaataaattcacatgcccttctggctgttaacctgtctattgtcagtttgttttatggactcaaattatcaaaccttcagaagctggagggaagaaaattcccttcacctctacgctatctattccagatttaacatccatgagtgaggtgctgaagggcccgggtctcccagtatcttggagaataatgaagtttgacaagctccagccctgctagtgggtgggctccagcccaggaagcagctcccagagcctttgctccagcgcggcagtggtgctgtctggtgtattgcagcccatgcatcccgcctaccccaggctcacactcgcagatgttatgatcccatgtcaagccctctcaccacacatcactctggaatacagggcagcagaagacaatccatttcctagtatgataaggcctttctgtctcttctttcttcctcctcattccacagcatagcaaccccagtgccttcccctactctgtgcctgattatctctttcttccttctcctccacagctagcatccttagaaaattcaagaccagtaatttcactagctctcaatagtaatcggagtgttcaaatcacagaagaatatattatgtagttccctattcttgtttttttcaaggctataattttcttgttcacttgctcaaggtttctccccattctcattttctaaataacataaaattgaccattttagccatttttaagtgtacagccataaggccttaagtgtattcacattcttgggctaccgtctctgccatccatctgcaaaattttttcatcttccaaaactaatactgtgtacccattaaacaataactggccacctcaccctagcctctggcaaccaccattctactttctgtctctgcgagtttgacttctccaggtacttcattatgattggaatcatacaggatttttccttctgtgtctggcttacttcaccatgcacactgtccacaaaattcatccatgttgcgacatgtgccaggatttccttccttcttaaggttaaataatattctgcgatatgtatgcaccacgttttgtttacccattcacttgtccatggacccttgagttgtttccaccttttggctattgtgaataaggttgctgtgaacatgggtgcataatcaaagtccttatcagtagaatcgaatctatgggaatgctgacattgctctggggaataattaacatggattaatgtttgcaaaaaggaaatgttgcagagctctctagtggatgttttaaattatgtctctcctttgccccttaaagatacatgatgcaattctagaacattaacaactcccaagttccttcatagctggatattttctttaacctctttattcttctgtacactcaggttagtttcttaaagcaattgaaattcttgagtttactttgatgctcaaagatttctagtataagcaggaggagaagaaattaacttagcacccaatctaacattttatataaaatggaaaaatactttgggagaccgaggcaggcggatcacgaggtcaggagatcgagaccatcctggccaagatggtgaaaccccttctctactaaaatacaaaaaattagctgggtgtggtggtgtgtgcctataacactagctgttcacgaggctgaggcaggggaatcccttgaacccgggaggtggatgttgcagtgagccaagatcgcgccactgcactcccaacctggagacagagcaagactctgtctcaaaaaaacaaaaaagttattgtaaccacctgatgggctcttcttgcccactacacagacaaaaccaattcactgagactatggcattgcaatagtttaattggcacaagactggccacagcacgtaggagatagagttattgctcaaatcaatctctgccaaaatttggagactagggtttttcaaggatagtttgacaggccagggggtctccttgtgagtgaggcctcatagctggttggtgggtccgagtggagccattggtggtcagaagtgcaaaaacctgaaaagacatttcaaaaggccagtcttaggttctagtacacaatagtgttgctatctgcagaaataattgagcacgttgaaatcttgtttcctctaggataatggctgataattgtgtacgtctgttccttaacataattcaggtccctcattctcctaacctgtgttcttgtattagttttgcaaaggccgtgtaggtttgggaaaggctgtcatgcccaggaatgactaaaggcggtttggaggttaaaggcaaagtggggattgtttagatacgttctctttcactgcaataattttctcactgttactatttttgcaaaggtgatttcattatgatggcttcttgggtttaatttcacagatgctaaagtccacttacttttttgtttactgacacaaaataaaaaagtattagaataagcagaattaaaaaacaaagaataagcagaattaaaaaacaaagaataagcagaatctgaaactcataacattttagatctgaaaggaatctcagaggcagtctgtcctgacgcctttattttatagctgaagaaacccacacagcttaagtgattccctttcttttatttcattcattcgttcattcattcattcaatatttactatcagctctgtataatgcaacatgttcaatactataaaacatacaaatgtttcttatagttttgtcctacccttaaaaagcctgttttctagcaaggcagaaaacctaggcattggaattccacacatatggagccactcctacgttcaggcccatgtgctaggatgttgaagaggacaccaagatgaaaggagggtgtccccatgctcctgagtgcatacagctgtgaaggagcaagagaaacacacactgtgctgttagaaggggtctgagcagggcaccagaaagcatctggcctcagcaggcagaggtgagaccactgagtggagcgtgatcacgtcatgaagccgtcagggtgagactgtgggggagtccggaagcgggtgtgagtggaggcggccttaaagattctcttgtgggctctctcattaggctgtagagatagagacacacagttctaatcctggctaaacctctggattctcactgtgacactcaaacagtactgagcctgccacacagtcttcttgtcaggataagaggagataacatctgtaagtgcttcagagtccccagaacataccagaattccatagatgttagccacggtgacttctgtactgtaaagagctttgcaatgacaactgaagtaaattgaatggaatatacttgattcaatagaaaatgggtagccacaaaaggattttatacaaaaaagtgatatattaataaatacacttaaaaattaatctggtccaggtgcggtggctcacacctgtaatcccagaactttgggaggctgaggtgggtggatcacttgaggtcaggagttcaagaccagcctggccaacatggcaaaaccctatctctactaaaaatacaaaaattagctgggcatggtggcacatgcctgtaatcccagctacttgggaggctgaggcaggaaaattgcttgaacttgggaggcagaggttgcagtgagttgagatcgcaccattgcactccagcctgggggacagagtgaaactgtgtctcaaagaaaaaaaagaaaaaaaattattctggcagaattgtgggggagtgagtggaatgaaggaaggcaggaggtggaatgagtgtcaggaggaaactgcaatagctcaggtggcaagtgagtgatgagagcctcattatatccaatggagtaacagtaacaataaattatatagatgttcagggcgtaaaactgtcaggcggaggaggaggacagaagcacagattgggtggaaagaaggggaaaaagcaaagatgaacacttggtacccaagtgagagactgagaggaacatgaaaagataaattggagatcggggaatgataccgattttaaacattttgaatcgaagcagagatatccaatatgcaggccacagcagagttaggtgcaacagcatcatgtcccagaagcagtaactggacttcataactatgaaatcactaatgaatttgaaaaaaaatagcagaggtgaacacggagaccaggttagaaatgatttagaatgcgtgaatggtgaggcatcggaagcagtcttaaaaaaaaaaatgactgtggaaaaaatcaagtagggtgggagagaaagggagcaattgcattttctttctctattttaacattgttgcacctcattctgtttttcagtttagaagaaagtgcaaacagagagggattgattgagatgttttccagaaggagaaaatggctagaggctccagaggaggcgccaatgatgaacattaaaacctagttggaaagtttaaccttggaatggaagaaaaaaccctcttcctctaagataaaagtaaaacagaaaagggatgatagaaagcaaaggtgttaggtgaaaaagagggaagcttaggaagctcactcagccccgatcgcctcacaaggcataatgacagcagtcgcctgctggagtgtgtgctgggaaagagatacagctatgcactggcaatttggaaggcgacaggtgggccgaacacctactctgccctgaatacaatgctaaatattttcagtttatctcatgcagtttgcaaacaatcatgagagggttttcagatgagacaatgaggactccggggctttccctgtgttgagtgttcagaggaggagttgagtgactcccagtcatgcgggttggggtggacacagcaggctgctggggccacaccatgtgaagctaagcctggaagcactggcaggattttagaacctagagatggggaaggaaattcccaaacattgtgtgagcaatttagagttgggagaaggtaggaaaacaaactctagaagaaagaacactatttgtttcatatggttgctgtaacaagttaccatgaactggatgaaaaagtaaaagaaattattctcacacatttctggagtccagaaattcaaaaccaagatggaggtggggttacactccctctggaggccctaggggaaatttaatctttgcttcttccaaattttggtggctaccagcatgccttggcttgtggccccatcactcaagtctctgcctccatctccacattgccttctcctctgtgtgtctctctccaaccccccaccacccctcgtttctagggacacatgtgattgcatttagagcccatccagataatccaggataatcacattctccaaagaccatgttttcaaataaggtaacattcacagattctggggatttgtatatagatgtatctttgggagccattactagcacgagcattttacagagtatgataaatgcaatgaaaactcagaataaataaattgggacaggcaatatattgaatgccagaaagcaaaataataataataataataatatagaatgtcaggtttcatacagtttatgcttccaataattataatgaaaagatatgagttcaatgtacacacacacacacacacacacacacacacacatatatatatactatgtgagaatccatgataatttagtaaaaagtcaaacaaaaaagcaaccttttctatccaacaacaacttaagggggaaagttttgaggaacaaaattacagataataaattggataatttgttattaagaagatcagcaaccccatcttcttaataactctccagaagatatgaaatgattctaataataataattacaaataattgaagaatagtttcctatagtaggagggtgctaccacccctcagcttccaaagtcttgctaggttatagtttgctgcttgaaactattgaataacttgtttaacttaggttacagtagctcattttgctgaaatatcataaatagcatacttcaaatcacttgcaaaaaaatatttttaacataccacaaaatctgcagtctataaatctgcaggctgcatggtatatgcatttccagtgtcaaaccattgaataataaatgccacggtctgcgatgcccgcaagttttgatttttccttttcctgaagccacagcgtggttcttaacgaagcagtagtttttcaacccttcaaacaaccaaatctttataacagtttcggaactgtataaaagagggaagtgtgtttcttcaaacactgtaatttcgcttgctcaaagacttcctccatacacagagcaccttctcttctacccggcccatgtagggttctactaacagaaagaaatgtgatattatttccatcatcaattgaactgtgagcgcctatgtaggtgggtgccagattctcactcaacagccaagtttattatatgggctcgtggaccctcttttacttctacctactaaatgccttttccggcttccccgcagacagctgcccaggctgtttgtgcaactcaagtgtgctgcaaagccagcctcacctctcaaggcagcctattctgtcttcaaactggctggaaggtccttcctctttggccattctatcgctgcccgctggaaggtccttccctttactgagctgaaatctgtttctctgtagtttctgaccatttggtctaagttataccctttggggcaaaccaaacaaatcgcttcaaagcccagcttttcaaatatttgaaaagggtgatattgtcctttcttgcactgagtctgttccaggctaaatgatcagacctcttctgtcatcctttacgtctcccaagtcccggttctctcatggtgctgctattcttttcttggtacagatcttctaatttccttttagcatgtactttcccacacggaatcccatgttccagattgacctgagccgtggatagcagagcagaaccagaccaggccacaggccacgttgttttcttttcttttttttttcttttctttttttttttttttttttgagacagagtcttgctctgttgcccaggctggagtgcagtggtatgatcttggctcactgcaacctccgcctcccaggttcaagcaattttcctgcctcagcctcctgagtaactgggactaaaggcaaccgccaccatgcccggctaattttttgtatttttagtagagatggggtttcactgtgttagccaggctggcctcaatctcctgaccttgtaatctgcccacctcggcctcctgaagtgctgggattacaggcgtgagccaccgcactgggtggattgtatacttttcttattgcagcctagaacaccttagcctttctgccgcccacctcacatttcctttcataagagtttctagcaaggaatttaaacctctctggacagtccgggaacaagtcactatgcctaaatgctttctcagtcagtccatcgttttccccaatcgcccaggggcttgctatgttcacctgtaacacatcgtatttgcttgtgaatacttgtatttaccagcttgtcatgtggtttactaaggggcgcagtaacttacaagagacatgtctaatgctgtggattttctcggaacttttaaatagggtgacaacctgagaaagttgcctgttggcacctacgcatcaaaacagaaagtttaaaaatcatgcattacttactttatggaagcttaaatgaataagaccgaattcgtattttctaaaaagatgtgcccagagtgtcatgggaagtggagtgggcgtgtgtgaagcacgatttggcttcttttcatgctaccttttttctctacagagatgccaaggatattctagaggaatcttaaagagccaagtgttcaggttcatttatgcattgttatatattttattcttgcctaaacactttgaagagtaaaatgagagattataaaaatagctagttcatccttttatcatttgagtttatatgtgtagttagtaggcctaaggagatcatgagaaagaaactgtgaaatgttacgcttttgagctgtcattggcaatgcaggtgacctcaaaaagtgaatggagtctatgtgtatggaagtgatcttggtgacatttggcctctgagctgtagtgggcatccctagacacttctgcactctgagttaagccttcattatgttcttggctttccctaaaatgcttatttattcagcagtgtgagaaaatgaaaagacagcaggtgcccgggggtgctatgtcgtatttcaagggcagaaatgtgaaagcacaagagcgggcttttcctcgcccttgggctctgcagttcacataagaggatttgctaactttcccatccccaacgagccatcagagggctacaaagaccacttacttctagcttacgccttaacagctttgaagaagaggcctgtgagcttatgagtatctgtaacttcagttttgctggattgcaccttctttcccagcaacattaattaaacattttgatttttttttcttcttgttgctctccttctcaagataagtccaggcaggtgtggaggagccgctgcgtacattgagaacagatggtggatttcatgtatcaatttatgccgtgccaccacttcggctgcctgactttctgtagggaaatcagcagtatgactgtaacttgattactaaaatcattgcataaagtatgtagtaaattctcccaagaactgaaagaggagtatgccaatacaatacgagaactatctaaagaaactccctactgtctgagcattccgggaatacaccgactccatataagtctgtgtgttggaaacctcttaggagtcaagaactaaaggcagttgagagatcattgtaggaaagtggtcctttactgaggaaaccatagtctagatgataggtcagtggtcaactgcctgctcagatccagtcctgaaacccagaaaggccaagttgatggaaatcatattctcacctctactcagctctgctgggccctcattgccattccggatttcttttgttcagatcttactaatcctttattttttggagcctttattttgagcccttagcaaaaataaaacttttttattttaaaaaacagcacatgcttattttaaaaatcaagaaatacagaaatgcatgaagaagaattcaaaatgtcactcaaagtcccaatcaccctactataaacatcaggaatgttaactgatacatgttaacatttgtattaacaaagatttaaagattaatatttatgtctataagaatatccagatagaaatgataaatgggaacaattcccatatataggatctataaacatgccaatttaattttatagtcaggtttattgaggtataatttatgtacaataaaattcaaccattttagatatatagctctatgagttttgacaaatacagtcatgtaaacttcaccacaatccagatacagaatattacctccaccccgtgaagttccctttggaaggtaccttgaaccttcttcctcccccacctcctgatgaaaactgatcggacttctgtctctggggttttgctttttccagaaagtcttatggataacatcatacagtatgtggacttacgtgactgatatctttcgcttagcaaaatgcttttgagagtcctccacgatattgtgtgtaatgatcatttgttagttaaaaaaattatttttagatatacggtcttgctctgtcatccaggctggcatacagtggcatgatcatagctcactgcagccttgaacttctgggctcaagtgacctcccacttcagcctgagtagctgggactacaggcacatgccaccacacccggataatttaatttgttaattttttgttgttgttgatgaatactatttcattatacaaatgtaccacattttgtttgtgtattcaccagtcaaaggacatttgagttgtttctagtttcagctattataaataaagctgctttgaacatttgtacacaggactttgtgtggatgtaggttttcatttctcttggataaaaatcgagcagtgggattgtgtttaacaccataaggaactggcaaattgtttcccaaagtggctgcaccattttgcattcccacaagcagtgttatgagaattctagtttcacctcatccccaccggcattgatactgtcaggttttaaaataatgtagtggtacctcattgtggttttaattcatattttcctaatgacttaagcatcttttttctgtgctttgtttgtcaataatatatattcttttgtgaaaaaatctattcaaatctctataccattttaaaaattgaattgagtttttattaatgcatttaaaagttctttttatggtttaaatataagttcttctcctgataagtattttgcaaaaatttttccctgtctgtggcttgcctttctattctcttagcagtatcttccacagtagagaagtttttaattttggaaaagttcagtttatcaatttttttcttttatggattgtgctttagatactgcttctaataaatatttttctaatctaaggtcgtgaaatttttttctgtattttcttctttaagttttatatttttaagatgtacatgtatttctatgatccacttgagttcatttgtgtataagctgagatgtttgtgttttgatttatagataaccacaagctccagaattatgtgttgaaaaaactatcctttcttgtctttgtcaataatcaattggcatagatgtgtgggccttttttggactctctatcctgttcttttggcctgtgttcatatcctttcagctataccacagtattttattatcacagtcctatggtaagtctcaaaattatgtagtgtgggttctccatgttgttagtcttttaagaatttgtttggacaattctagtcttctactttttcatataaattttagaatcaacttgccgatatttacaaaaagaatgctgctggaattttcactggaattacattgagtctacaggtcagtttaggaagaattggcatcttaacaatattgagtcttctgatccatgaacatagtacatctttctactcatacagatcttatttaatttcttttatcagtgttttatagtattctgcataaaaatctttacatattttgttagattttactaagaattttgttttcaatgttgttttacataatactttttcaaataaagttcctattattcattgctggtgtatagaaatacaatggacttttgtatattgaccttgtatattgcaaccttctagacccactcattagttccagtagtttttggtagattctttgagattttctatgcagacaatcatattatctttgaatagaacaccttttccttctttcccaatcaatatgactgttgtttctttttcatcagtttaattttcaaaagataccaaatataattttgcattaatgcaagggaaaagtgctattaaagaaaccaaataaagaaaaacagataaatgttactttatcaaatgaaatattagtgtctaagagatcatattaaaataatgaaacaaagattttgaaaataattaaggaattatactcattaagtttttgtacctctgtttcaaatttagatattattgataaactcaatcatatgaaagataaacaacattaacaattttatacttcttcttttttcttcccctacctcctaatgctttggttacattgttatgtttattttgccaggattataacaccttaaattctgtaacagaaattcccacaataatttagttttagtttcaaattaaagaaagaatcaatcctcacacccattctctcaccactgcttctccattcctggcatttttgcttggatgaataacatatttcaccggatttcatcgtcagaagttgttggcattttttctcaaaaataattcgtgctatagtccctgaattctctagagatttatggttagcctaaatttttcaccacttgtagatgcctttcttttttcttgtctgaatgtctgaaaattctttcttcatgcttgatgtcaagtaattttgaaagaaagtattttggtgtcaattattctgtacccacttttcctggagcactttctgttatttcagagaattatccttggtacaaaattcttataaaaagaaggtttggtgctataatagtttcttctttgagaaatattatttatttggatcattgttgtctagcttccatttctttaatctcctttcccatgctttcactctcatatgttgattgctgtctctaatgtattgttctgtaaagggctattatttaatttctcaatttccttaactctacaatctcccctagttttattatttaaccatgtttgaccttgtttcaatgatattacattactaagtccttgcatgatgctaataaaattttactagtttttaaatccaagcttttgctcagcaacttccttcctcttttcttcctttcccttcctgtatcatccttccttcctttctctttttcttcacttttttctccccatcccctcttctgttcttcatccttctcctccacctcagtgctgtgtctacatagctaccatgccattttcatcctgcttatgcctaccacagacaatacttcccagatctcttagttgctatcacaaatgaggaaaatcactccgaacctgtcagcccttgtctgaccacagtctatttgcttccagcctatgagctgaaattcgagtgttctgttctgtttgcttttccgtactttgaaagcctggcaggagaggaaaggccactggtcctaagcacaatgtttgttgatggaaaggggtgagaaaatatcaaggagaaacttaaaagtatcctagttattgatgaatactatattgctacttttgtagaagattttgtaatagttttcagtgtttaacatttcttgatttaaaaatatgctttcaagacattctttgtctttaggtataactgacacaataacaaaacactgttttttccaagacaccattcattactttatttcttttacattttgataggtcagcttcaacaaggcataatattccttgttttgttttaataagatggcttttttcaaggaatcaatgtagttatgtaacaattcaaaggcatttgctaaccatatcacccctctcatgctccccgactatgcagagtaaaccagaagccagcataacaaaatacacctgcaaccatctagactaacattaaatgggagtgggttgccttgaaaacagtatataaaggccgtctcttcctgtttaagacagacggctctgagagattcagacacaggcggcagtcaggcagggtcgaggcagcctgcacaggggaaagccctgggaggcagaactagacagaaccatctggagtctgcacttggccaaacctcagctacgtaatcatggataattcacatcactcgccaaacctcaactctccaatctataaaatggggaagtgttcactttccttttgttcattctttcgttcttttattttcacaactgccgtgtcccggaaatctgctgtacgtgtcaccgtggctctcgtagaaggtcccagcacggggtcaagcagggcacaaagacacgtggacgccctgccctcaccgtgctgatgctccagtgtgcatgagggtgtttcacctgtgaacagatagaagctcagagagttgtgcatcctcatgagaaaaacaaagccatcagagaaatgcaaatcaaaaccgcaatgagataccatctcacacctgttagaatggcgatcattaaaaagtcaggaaacaacaggtgctggagaggatgtggagaaataggaacacttttacactgttggtgggactgtaaactggttcaaccattgtggaagtcattgtggcgattcctcagggatctagaactagaaataccatttgacccagctatcccattactgggtatatactcaaaggactataaatcatgctgctataaagacacatgcacacgtatgtttattgcagcactattcacaatagcaaagacttggaaccaacccgaatgtccatcaatgatagactggattaagaaaatgtggcacatatacaccatggaatactatgcagccataaaaaatgatgagttcatgtcctttgtagggacatggatgaagctggaaaccatcattctcagcaaactattgcaaggacagaaaaccaaacaccgcatgttctcactcataggtgggaattgaacaatgagaacacatggacacaggaaggggaacatcacacaccggggcctgtcgtggggtgggggggggggagggatagcattaggagatatacctaatgtaaatggcgagttaatgggtgcagcacaccaacatggcacatgtatacatatgtaacaaacctgcacgttgtgcacatgtaccctagaacttaaagtataataattaaaaacaaacaaacaaacaaacaaaaacaaagccgagtaacggatagaaagcgactggagagttggtgctgaactagctgctgcgttgatgggaagctctggcagccacgtgagcttggtctaaccaagggacaggaagatgggcctactgccacacacggaaagtggggagggtggacggggacgctgctgggagggagcagagcccaggtcgtgtaggctgaggcgaggcactggaattgtgctgtaactgcaggcagcagcaatcgggctctccactggggagtgatagaatcagatgtgaggtgtggagttccctgggtgctgggtggaaagcgcaatgcagaagagcaagagtgtcagcgggtcccagtcaggaaggaatcccggggtccaggacagagaccagatccgcttgagtggaggcttggcattggaggtgatgggcgatcgttctattcagcaggtccttagcggcaaagtccacaggacatgctgagggcttggatatggggatggggaaagcgaggcgccaggtacggctcctgggcttctgactcaataaattggtagatggaggtgtcatttaccaagatggggaaataaggcggagggacgaggtgaagtgcggagaggtgggcttgaatcacacacttgctttgcttttaggtctttaaataagattttatagtgatcctcatatatggatattgtacaaaatgtattgcttttcagatcatgttaatgcttactttttcacgtttccactcttacttaattgccaaaatagagaaaacctattcaaaaacacttatctggtatacctgcaaattctttttttaattctctcagtttctctttagctagaatcacttgttttgccaggtacaaaatagtatcacagcaataggagataattggctcttttctttttcaatgcttatgaaattagattttaccttaatcatatgtactaaaatcctcaaggcttttaacagccgtggaacatgtttctgcctagttcctgattttaactggaaatattgtaatgttatgccttttaggatactgtttatttttgtttttttgggtaaagagttgctttatttttctttctttctttcttttctttcttctttctttcttttttttttttgttttttgacagagtctcactctgtcacccaggctggagtgcagtgatgctatctcggctctctgcaatttccacctcctgggttcaagcaattatcctgcctcagccacccaagtagctgggattacagatgtccaccaccacgctggttaattttttgtattttttttagtacagacggggtgtcaccatgttggccaggctggtctcaaactcctgacctcaggtgatctacctgtcttggcctccccaagtgatgggattataggtgtgagccaccatgcctggcctaatttctatttttaatgagcaattatcacagaattctatcttttcagtatatgattatccaacttttttcattttatgatttaaaataaatagctgtattttcaatgattaaatcaaatatatgtgatgctgattgcttgtgtactctgaatagttagagaacattgaagtttggtatagtttgcaaatgcatttgaattgttacataactgcattaatttcttgagaaaagcaaccttattaaacaaatctcttttttttgcttactttggctcttttaaaaaaaacaacctttaatgttttttaagatcagcctttaattttatagctaatatgtttaatagatggtaaattataataataggttttgtctttctggttcttttctggatggttatattaatatacgacattattatggctgctgtttatttgtgcctccagcaagctatttttaaaggaaatgtaattatgtttctatccttcatgatccagaggttattatggataattttattcttttattgaagcagatctctgacttatggcctcatcatccaagagaaactgcatttcaaaatcagaaaaaggcttaagctacaaccatgactaaaagcaattaactaagagaatatcttgttattttaaccttatcaacacattttctgattcttaaagtttggtttgtggggccatgaatagttttatcatatacttcacaatcatgctaatgtatacctctcattccagcatcctacgtggcttagcacttaacctgggatttttattttaactgaattattatgtgcatttaaataagccaatagtagttagatagacctctactttctacttccaagttctgccataatttgaattatggtacataagacacatgggcagaaaaagagggctcattcagacatggaggtaaatccaaaagctcaccagtggtaacttttctcttaaagacacttggcgggcatcttaaaccaatgcttttctttcaagcataggattaaaagtgcttagtgataaaacaaagtgcaccagggacttattcagctagggacagctaattccttccagtcttggtggaagtatacattagtaaatcccattttgggggtgaggcattttatcagtaaagatcaaagttcaaaatatttaaaactaggccaggtatggtggctcacgcctgtaatcccagcactttgggagactgaggcaggtggatcacctaaggtcaggagctcgagatcagcctggccaatatagttaaactccatctctactaaaaatacaaaaattagccaggtgaggtggcacatgcctgtaatcccagctactcaggaggctgaggcaggaaaatcgcttgaacttgggcagtgggggttgcaaagggctgagatcgtgccactgcactccagcctgggtgacagtgggactccatctcaaaaaaaaacaaaaaaatttaaatcctaaagcttgcaattcttctagtattctgcaatagagaagtactttacactcgcgtcaaaagttgtatggagaagggtacaaaacacagagaagagtttgttattgagagaaactgaaaggaatacaatgactatgagtcagggggaaggtgattaattaaaatacaacaattccatattatggtacttttaaaaataataatatttgagtgtaatgagggggaaaaagtcttggaagtcatgttattacctgaaaaaacaccaagtcaaaagacaatacagactctagaacgccttttatgataagccaagcaacactgtatatgtgtgtcatgtgtagttacatatgcacgtaagcatggacctgatcagtcctggaaagacatatgcaaagcactttccagggtttacctctaaagggagcagagggctgcaagccagggccaggagggagactttcatatttattctcttcacatctgcgttgcctgaaactttaacagagaaaatttagtcatagattatgtgcataattttttaaaactaagcactgtaaaatgaaaagtcactctctacaactatatgcttcaacaaacatacttcctatgcagactcactcagttacagagcgatgggaattggccacagggactaaatccctgcctccgggagacgtttttggttttattttttgttgtttttaattaatttttttagttgataaatgaaaaccaaatatatttatggtatactaacatgatgttttgaaatatataaacattgtgggatggccacctcaagctaatgaacatatgtatcacctcatgtgcttatttttttgtggtgagaacacttaaaatgtactctgtttgcaatttgcaaattgttattaactatatttactatgtcatccaatagatatcttgcatttattccttactattttatttatttgttcttgccttatttttaaccaggaaagttttaccctcagatttggatgttctataaaacaagtagttgaggacatacttcctggtattagaacttccagggaatttccaaatgactgcctcacagtttctctgagtcacccctatactttcatgaggaaatctgatcccattcagccagatattccataataaaaataaaaagagtccggatttttaaaatataaatattcacatatgtgaagcattgtgccaaacacaatatactgtagcatgcaaaaaaaaaaaaaatcagggtaaggtaaaaccaataatagtgctttaactttgggataaaataaatggcctcgttcctatgttaggagcaaggtcactcacacaattccagccaaggacaactaatggaaggttagtgtcagcaagtaactgaacacaatgatgaaatacataaagatacagcagagtttatttacagttagcttccttatgaaactatctaaaagtatcagtagagaatggaatgtgtgtgggaaatggcattagaaaacgccttggccctaaagctgcttcttagcttgattaggaccttaaaaatgcattttgtcaattacaacagaaatttggaaatcataagtatgaaaaataagaaaattaagtcattcagcatgcatctttggggcccttatttttgaaccaggcctgttccaggtgctgaacaagactgacccgaactcttaccctcagaaagcttgcattccaatgaacagattctctgtaatttcaccgccttcataaaaccattgggttatatcttttttgatcttttctcctcgagttatgcatgcctgtttttcacagaaatattgggatcacagcgagtattttatacttgaaataaggtagccacattttccatattaataaatatttttcaacagcattatttttggcacaacactatgttccagcgcctcagcaaaccgtagttcaatctcttatttgttcagataattttattttttcattattattaacaacaatatgatggacatccttgtagataaatttgtgcacatgtctaagactacttcagaataaagagtaagtgaaattgcaggataaaagggttacaggatgctcttcagttactgatgaaagttaacatactattttaatattaaaattaatgtttgatataagctagcaaagcaaaaagttagacgtttatattttatttaattaaaataagggggaaatcacattatttagtttatattggcataattatttacaataatataaatgttcatgttatatttttatgtctgcatacaatagtcctctttaatagaatagttaacatattttggcttaaaaagccatttcttacacattattctaggaaatatataatttaaaaattatagttttggacagtatgcagggtaaattatgagcgtagagttgcatcaaaccccagtctttctctaaagtattcattttttatgtagaagcagagattgtaatcgctgttacatgattgatctacccttttgatcagctcttagcagcaaagaaaaatagatatgcatttccctagattttgaattagaatttcaaactgtctttcctggttcatgcttatcaattttcaaagttggaaacacaactaaagctgtcaaaaatataggtagcttgtgctataatattaagacatttcttatcctgctggatttgtattggaatcagtgggaattcaagtagtaaggcaggatctattggcagctagcactcaggggaaggaaaaatagaagcgggcatcattaagaacaggtttctcttgctccatctccgtaagtccacataaggtaaaagacctatatacacttctgagatgcaaacggtgtgtcagaaaagattcaagaacagtttaaaaataaaagtcattgcaacataccagatgaggaattctatatggggaggagtagctgggctgctctgtaagtcttcatctgggtgagttgttggggaaaacacgtttttgtgtaacattcattttatagtggcccttatttatcattttattcttttacccaatatttaataagcatcctctctatgctaggctctctgctaagcacagccctatgctggtgactaaagcagaggtggctgacgtacctgccatggaggtgtcatccagcctatgctaaaaatatcccagcgactcccacctctagtggtcaccaatgaatgtgaaggtgagatcagtcacagcagccgctgtcctcctgaaaataatgggaggtgtagagggttcctcccttcccagcattgcatgggagaaaggcctgaggtacccacctctgtgggacaagatggaagctcaggagaaaggaagaaaagatcctccctccctctttctccctctccccaaccacatttctctttttctcttcctgaaattaatctataaatcattttgattttaggctctggtggcttagaaaaacttagataaaagataagcaatttcttgtggccttttttggtatggagagtctaaataattcaaaacacaatgaaaatattttccttgaaagtgattgttattgataaatatcatcattcttcgttgtcatcatcactggtcatttactgatatttagtgcattccacgcgcacagatgttggcacgtgcatcttgtgaaattcccacagctctgccaaggaggtgttagtatcccccttgtacagatggaggaaaatggaagctaaggctatgcgtgtggtttgcccagggtcacacctctaataagaggaatgacccagattagattagatcctcaaagctataaatcatgcaccagttgcccaaattaactgcattcactgtatgttacacgcctctgataaaagttgcctgtaggaggattcatggaatttctcttctttcccctggatttctccccagatacaaacaaaatcagagtttctattaagggtgccttcagaacatgaaaatgaggctagagcatgatgacaaattgatgtatttttcaaatccattgtattttttaatataacacttttacctcctaaatttacacacgtaaagtttttaaaaagagaaaataaatgtttaaaagtaaatgcatgccaatttcagtgttttccaaagaaagtctgtatggtttgctttgatgagcagtatgacattagagatggatgacagtcctgagagaaggaagtcacatctcatacaaaccaggcactgtcatcagtcacagaaagctgccatttgtcaaggtattctgcacagggaaatgtaaactcagatctagaaagccagcacaataccgaggggctgcacattagggaacaggtgtatttccaagcaagagtgactcagatgaaacgatctccacctttcacaggacctgcaatatgccggtcagctacagaacagcctttgggtggagagagaaagacttgctgtcatagaggacatttcctcattagtgaaggcaaggaaaggaagaactgcaaaacctctttcagcaggaaaccactgcctgcatgtcttgagaattttagcatttccgctcttgtatttttcttgtgagtgtgggttttagcatccactaattacagcatccctgaattttattccttcgctaggcattatatgtaagtaaagggaagctgtgctgggctttctggagggcccaggcattcctcatagcacttgtagttacctaagctctcttagtgtttccatttgtaaaatccatcttttgctgatttgtattttcgctctaaggattctttgtttcatgggcttagtgtttttctgagcttcatgtcctcggtattctcggaaacgtgaatattttgaaatacactgttaagaatgaaaaaggatttcacctggctaactttttgttaaggtacaaaaaaaacaaaattcacttttaaaatatatttgtcaagtgcctgacatgtacactatttaaagacgagacataaacattgttttgattacaggggaatagactctgtgtggttttattgattcaaaggtgcatactaattgctttttgatagttgcattaactttgtatttgggaagttatttcatctgactccctgaaacttgcccgagggtccagtaatcactattgtgcatatggagagaagctaaagagagtgaccaatgccatctaaccctgtctcctcaaatcctcgcacagtgatggaggcatagcaggtgttcagaaagttgaaatgaatgaatgtggcttctttccttaatgttcatggaattatttagaaaaaaaaggaatccttgattgacactgggtctgtaaaagcacagcagtgggctccttcccatcacatcacctcaccaaaggtggattctgaaaactctcccaaggcccagtcccaggattcaccgggcagccctcacgacctgcgcactcactgcagaagctgcctgagagagcaaagccggagccgcatggttccccctgaggaacgagcgcagcatccgtccaacgtgccaacctcagacacgagctgggcagcgttttcagatgctgacagcagttcggtctcattagagacacagatattgtcatcaaagttcaaacaggatcagagacaaacagtttgaaacataacactgaaaacgtggctgtgactgccaattatttcaaataagcctcctttgtctgggtagttgggatgcccgcattgggtcatgaaaagaagagatgcagggctcagagctcacagtcttctgtgcgaccccttgggtcaggctgtgttatgtcagactgcagtgtctcgtctcctgaagatttcacgaattctgcaattcccctacgcagggaacccaacttttcattcatgtttatttgcagtagatctcaatctgtgagctctagataacgacaataacattttcctcacttaaaaggcagataaaagcagaagtttagagcatacaatggcccaataagtttgaaaatgcagtgttaacagtgtaaattactgtagtggttagttgttataattattttatttctaatttacagtacagttggttgaaagtcttactccctcagtaaacaattaagaaagatttttcaactttttatcctctttaaacttatatacataaaagaacggttgcatcttatgggaatattttatttgaagaaaatgttaataaattaactgacacctttaaattattcctcgagaaatccattctcctggaattagaaaaagaattttccttttgcagctggggaatttgctaaatctgcagagtcaaagcagaaatgaggctcagtgattcccaattccatggatttgtctatgagactttgctccctgcctggtgactctggcagacactccacttgcctacccaaactcaaatttcctttcttagtaagagaaccccatttgcatcagaaatgacaacatgcacaagtgacaactacattttccagcatctgtttcagccagcttggtgaatgagtgaggcttcaagaaatgttcgcatctgccttattgctcttgacctgttggctgctgcttcttgctagaatgtgcgtgtgggagctgagggtgcagcagccatctggtaggagccaagtatgagggcatatgcccagggtagcagcataaagacagaaggagactgagacaggggtcatacagtgggcccttcagaaaagtcttgatctgcctatatctactgttttcagtagaaaaaaataaaccttgtatttgtttaacctgcagttattccagttcctcctaccaactgaatacatttcctacctgaaaaagtgtcacaatgcagttctccagtgagtcagaaagattaagaaaaagtgtcacaatgcagttctccagtgagtcagaaagattaagaaaatattttctctcaattatttataagatcgctattcttagagtttgctgtttggaatagaaaaccacctgcccattccagtgcctggtttgttgatgtggtactctcctcttccacactaggcagagttctggtcagttttcacttgctcaccaccaaaggcaagttcttggccaacagtccaagcgttcagaagtttgctgcgattgtgtatttctcatatgctccataaaatcagcattgtttctcctccaggttgaacccctgggattctgtttgtcttcattaccctgtatttaaagtggaatattctgtgctaacttaacgaacatgtgatttatagctgacaaagtgtccaaccactgcctgagacaagggatttttctctactgattcaaaaataatactctttggtagaatattgacacagcatgacttgcccctggtgatggagacagcgtccctgtcactgttttgccgaacacctttagcttttctctattcccctaaacaggctttacagagagggcacaacatgaaaaaaattacaaccggtggtggcacaaaaaacgtggtgcttagccaacactcatgatattaaatagtggtgaggcaatttactaaaatattcatttgtctgtgtcgtcttcgttttttccctccacgcccctcaacctagcactaatccctccttcttgaaattttaggagctggggtgtcttttagaaagtagaagctttcggctgggcacggtggctcatgcctgtaatcccagcactttgggaggccgaggtgggtggatcacgagatcaggagattgagaccatcctggctaacatagtgaaaccctgtctctactgaaaatacaaaaaattagctgggcatggtggcacacgcctgtaatcccagctactcgggaagctgaggcaggagaatcgcttgaacccgggaggcggaagttgcagtgagccaagatcgtgccactgcactccagcctgggtgacagagtgagactctgcctcaaaaaaaaaaaaaaagaaagaaaaaaagaaaagaaaagagaaaggaaagtagaagcttttaatttctatttgttactctacccctctaactaaattcctgttggaagttagaggcacttattgtcttttatggaggctgaaatgaactgagattagggaatgtcccgaaggaagggaagaaaggacttggcctttaaaggcctcaagagggagagattttctaacagatgagatagagctgggacactatttgtgctatgaatagttggtgggacccctgagggttagctgtgtaatgcccctagagacggtgccccctcgaggtgtaggtgccccagcctctctggggactcccagagccaagtatggcaacaagcagtagagtccccagacctgaaggtaatttagagagagtcgataatggactacatctgtcctaatgcctgggacctcccttcaatcctagcctagaccggtgtcaggacctttgcatgacaggaatagagctcaaggaagcaagcaagcagggatgatttgggtttcatttcctgtcagtccaatggttgaactcaaatttgagctgacttaaacaagaaatgtgatcattcctccctctgacttcttggactaagattgtccacctactgtattatagatgaaaatgaaataaaagatatgcaaacatagatcttgcagacatgacaggaagtccgtccaccctggtgcattttctctctactcgtgcctgttttcatatcaggtgaagagggatcatcttgtcataactcaaagcctaaagtagctaaaagttatttagccctttgctaataggaagttctattttcatctttaaaataaaccttctggccaggcgcggtggctcatgcctctaatcccagcactttgggaggctgaggcgggcggatcacgaggccaggagttcgagaccagcctgatcaacatggtgaaaccccatctctactaaaaatacaaaaattagccgagtgtggtggtgcatgcctataatcccagctactcaggaggctgaggcaggagaatcgcttgaacctgggaggcgggggttgcagtgagccaagctggcgccaccacactccagcctgggtgaaagagtgagactccatctcaaaataaataaataaataataaaataaaataaaataaacctttaatattttagtatacattgcgttactcctgaaggagatctctcctcattagagcactgtgttattttctcataactcagagtcctgcctttattcccttgttctgtaatgccaatgcttgggcatagaatgcacactgaaacaagcaatttgtattaagaaatgtacatttattggtgctggcaattcaggatatggtagcaatagtgataaaataaattgcaaggtggcagtaatctacgagttttactgaggtttcaagacaatattcaagataggaaacaagtagcttgtcataaagtataatttgttatgtagattagaactgtcaattttgagatggagaaaaaagagaaatgaggtgaaactgtctctgttttgcctagaaataattctttctaatgatttgaactaaagcaagcgaatccgttattacctccactgtataggatggaacaagaaacaggaggaagaaacatgacgctcttgaatggggctcatgtcccttacaaaattgaatgtgcattaagtgcaatatgcatgtgagtgtatacttgttttccataggagggacagttctatttaagtaaaacccagttccaaggcaaagtgtttaatttaaattcagtcttcttactaacaattagggtaagtgaattaaatgaaattaagtctgatttgggacaggttctccatttcagcttcctggtaaacactgcgcttggtttgtttgctgagaggctgggaacactggcacatttaatctcagcactggtactcagggaacgctagcaaccccggccactccttggtaatcagtatcttacaatgacaactggctggtgacaggaatcttttaaccacagaaaccaatgcaagaattagaaaacagaaaacactcttaaatatggctgcattttttaggctttctaggccttctggaatttcctttggcaatttgtacatatcaaaacctgcatttcctgggcgagagttcacagagacccatggcaaaaagcctagttacatcatgccatttgaaaccagtttgtggacagttggtatttcagagccaaccctgttttatcattaaaagaaaaatctcagcaccttgtgtaagataaattaaaaggcatgtttatcaagaaagagctagaattttcatagtacagtatctgataaaaaattgggagcagactttaaaacccgatggtgccacagcttgactagcgttctctgagaccagaaccagaggtcacattatcgaggactaaagaaaaatataacgtgcttaaagtggaaggaaacgtctaaaagttaggctaagagtgccttgaaaatgtcctgagtggatgaactcattcctttaggaaggatgttcttgaaatggtgttctgtacgtttccgtgttcccattccagaacttaatacccgttaaagcctatagatctcctaagtctttcaggttttgttcttatttttgttgttgttttttaaccagttctcaagggagaccggtaataatacatctgctgattttaggtctgaggtttgcatatgacacttcaaccaggaggatgatttccaatagagttaaattagtgggtgttgatgaggatgggggagtggggcaaggagtggaagccagcaggtagatgcagcagccacagtggagtccctgaaattcccgccccttgttcctgtgcagggggccgcggtgcgctgttgtcaccgcacctcttaacgtttccgtcacttgagttggaggttgataactaaacttatgtgaactattctctttgaataataaagggaactctaaattactccatcttggcagccatatcaaagacaggaaaacgcaacagaaagatgcccatggtaatgtcgaaactgagctttcattttgggagctgggaaggtagcaagaatatggaccaggcggggcaggtaaagattgagcccaaagcatcggctcctcctcttctgctgtccgcccctcccgttcatccttcccccattctcagtacacacaacccaccgtccaggatatgcttttctttttcttttttttttgagacagagtctcactctatcgcccaggctggagtgcagtggcttcgtctcagctcactgcaaattctgcctcctgggttcaagcaattctcttacctcggcctcccaagtagttgttattacgggcacctgacaccatgcccgggtaattttttgtgtttttagtagagacagggtttcaccatgttggccaggctggtctcgaactcctgacctcaagcaatctgactgccttggcctcccaaagtgctgggattataggcgtgagccaccgcacccggccgttcagtgatctatttgctcttaccaaggcgttttctcttagtaaactgttaaataattctttgcctgcctccacttcccaaatctttaaaattaaatttgatgaagcaaatatagtgatagtggtgatgatttcaaatcttcaaatgtaatagtaagtttcagctggatgtttctatcctagttttttgctttatagaaaagtttacaaatcagcatgtaaaagtcttactgtacaagtaataaacggagcatcacaaaaataaacgtggtcctttaattctaagagaccacttcttttcagggcttttaatctctttctttgaatctaatgtttagttgtggggaaaattcaatgtgatattctttgcttcaaaggtattttgttggtggcatgagtgtttttcttgaggtatgtttttgcccttctgttacactccggctttttatagtataatgagaacaatgacctcattctctccagttgatagtaataatggcacactttttataacttgaaaaggcatctgcttattgataagagagttaaaattaactataacacaagagttagccattgcatacttcaccttatcttgcagaccacaataaataggatggaaaacatggaaagcttgtggttaatctttgtaaataataatctgtgttcctgtagagacctttatcttctttttatgctttatttcatagctaaaaaattaaagaaccccatattgttaaatatagccctttctaaattgtacaaacaacactaaaatggggagaaaattaaaggcttataatgaagaggttatatttaattcacaatcatagcatttgatagattaataaaaatgtaaaaatggacaagctgatttttcacactttggaggtgacacacatcttccacctaggtccacactccaattacagtttctgagtatgtctgcttagaaatcataaaaataccattaaaactggaggtttaattctaaacaagaagaaggatgataaatgaatttaaagaccctggcaagataaaaaacttgaaaactgaataatgaaaataatcctatgcaatagcactggtatttctaaactaatctgtgaaataactcaattctaaacaaataagaagacagtatattaaacatgtggtcttttgtttatgaattaaagctgtgagtatattgaattggagatagtgataaattccagaaggaaataagcataggacgttgcacagtactgtaatgatccatccatgtacctgtctccctaactgaattaaaatatccttataggactgcatatcatttttatctctttttcaacctcagtacccgacattgcctggcacacacaggcactcaataaaggtctatattatacacattgttgaaagaaggcagatcccatcattcctattctaggccactgctctttaaaaatgtttaatgccgtgtttcccctaatgtaaaaatgcaaatccaggtggagggacgtgcctttagtctaattagcatggtataccttaacataataatttaaggttcttgagagcttctcaagattccttccgtgtcccacctctccactggcctggcgtgcagtgcattggcacaggcagggatgagggggcatagaggtaggcactagacccgtgagcaggtttgactacaagagtcccaggggctctacaagagaaggcggatgggtactaacaaattgtaccagctgcccaactgtaattatgttcaggcttaaccaccaatccagaggtgtcaggtgtatttgaggagggaagacagccccaccaccaccctcagtggaggggaaacaagagggggacctgaggttgaagggcagaggaagaagaggcaagcttcctcacaccagggcaaaaatgatcatgtaacgtggaacattcatccaggaaatatgtatttcttgcatattgtgtgtgaaatactattaactgtttgaaaaatacatcacaggcagtggctgccttcagtgagctaagagttttgtaaagaagtcaagggcttagttaagtgcaccgcaaggtaagcagtgatctcagccaccagagggatctaagtggaccttgtgtttaggaggagaaattcccttggcagccatgccatcatggcgagcctggactcccatcttgggacccaccagttcacagtccttactgtaaaataaatgcaatttgctcaaagtcaaatatatcctgtcgctctcatgcctctacaacctgtcagtagccattcttcattgcttttcacatcactgaaaccccataccatgtcctacaaggctcaaggccctgcagaatctgcctgtgtgcagtttgaagctgcaaagcctggcaccttcacaccggatctgtagtcacggcccaacacctactgggtccccctgttgctgttgctcttagtaatgcttctctctctcttttgcacttgcaagcacacacacacacacatatacatacactgttttttattcaatttgtatagtgtttctggaaattttcttcctctgcatactctctactccggtagttgctgtggttgtaatgctctcctccctgctcccagcaccttgttcatgccaccgtcatctctcatccggactattgccagccttgcccagcttccagttgccccctagtatcaagtatccacacagcaggcaaagtgttgtctataaaatagaagtcagggctgggcgcagtggctcacgcctgtaatcccagcactttgggagactgaggcaagtggatcatgaggtcaggagttcaaaaccagcctggccaaaaaccccatttctgttaaaactacaaaaattagccaggcacagtggcaggtgcctgtaatcccagctacttgggaggctgaggcaggaggatcgcttgaacctgggtggcagaggttgcagtaagccaagatcgcaccactgcactccagcctggcaacagagtgagattccatctcaaaaaaagaaagaaaaaaaaaaaaatagaagtcagatctttttccacccctttaattaaaatgcatctggaataagatccagattcctctctgggacctctaaagcactctgttagctgcctgccttctttctcctcctccagcctcatcatttgaatccttcctgtcctcccacctacactagcttccttttggtctctcaagcactcaaaacacattctgactgcacagactcacacattccgtatgctcatgtaaaccaaaaataaaattctaagccccccacccgactgatggaccccaccccccattttcagcgaaggacattccaaagaaaccttcaccttcagccaagggcattccaaagaaacctgaaaacattcgttcaggccacagtgggaagtggaagttgaacatccctccttataccctcctacctttggagttcaggcactgaccagcatgaacattaaaacagaaatctgccgacaaaacagactgtttatagcaatgatgccaacaagatagacagcaggccctgaaagaagttgaagtattttaccccaaaatgtatttctttgacatcttttgaaatggcccagcaaagctgtctcatggggaaagtctgcattctacagagaacccctttccctttccatgatccaagagagaataagctaagagtctggcatctttttaagtctgataaggaacatttaccacctactgtctctgaagcttgctactggaggcttcaccttggtttccacgacctcttatcttcacccagaccctcctttctattgagtccaggtgtttagataataacctaactttttcaaccaactgccaatcagaaagtctttgaatccacctggaagcctcccaccttcgagttgtcccacctttccagactgaaccaaagtacaccttatatgtcttgattgatgtcttatgtctccctaaaatgtataaaaccaagctgtagcccagccaccttgggtacatgtcctcaggaccccctgaggctgtgttatggattatggtcctcacatttggctcagaacaagcctctccaaatattttacagagtttgacccttttcaccaacaccaagaacattcttctcgcagatgctcccacaactcttctgttgaatggggcttcagcgtgagtgccagttccatgtgaggccctttctaaccagccaagctaaagccagccctcaggcactgctttgtcacgtgctctctttattgtctgcatggcactcattatcgaaattgtcaactattaatttgtttacttgtttgtttatttaccatcatcctctgctctggaatgcaagcttgttaggaagaaaaaccatatcaaccttattcatccagtagctggtgcagtctttgagacttatagggttcaacagttgcttcccgaataaatgagccagttttctttctcttgctcttctccatctccatttgctcattatattttgtgtgatcctttttcgtatgtagtggaaagttttctggaacctgcacctgcttatacaattacaagtgaccttttatgtatggaccacctttaagcaacctccaatgttaaaaaggaaaaatatgttaataataaattatggaaggatcttgagcatattgttaaaaatttaaatacttagtgtcatgtttacttaccattcatctctctgcatgactcacagtgtttgcttctttacctgttcattgtctctaagcacctgcttttggaactaattgccatcagcaccttagttttttgttgattatgcattccctgtagctccaagtttctattgcctctgccatatgctcccatttattcaccatcttttataggtcacccattgtgccctgggcggtgagaaacaaaggtgacttaaaaatgatccctgacctcaggaggcttacaaactactaaaggagatgggtacataaaccagcaaaaacaatatgtatcatagggtctagaatacacatatttatggggaatcatgggggcccaaacaagagagagtggtcaattttccatgagaatgagggagtcaggaatgctttagggaagagtgatcttgcagaggagaacagacgttcctagcaaggaagcgagactggcaaaggctggagttgtaaaatcgcccagcactttgaggaactgcacagagtgtgggaaacgcagggtgtgagggaagtggattaagagataagagagaggcaggcacagcgtggaggagcagctgggaggataaggtatgctctgctgaaatatttcagttttgtctcatgggaaaaataaccactgaaagtgtttattttctaccctaaggaatcccaagaaagtcacagtccattcacagaatgaattctttgtcttcaagttttccgactgaaataagtcccgttatggccattagtatatgtttttaaagacccagcagaaacctccttacaaacaatagactccttaacctccaacaagccaagtatgttgttgttttcttggcaatttcctgcaacatttttctcatgcttgttttcgactagccttttgggttcaccaaaaccttgtatatactcattatattgtgtaagtggactacaatctcaaaaatgagaaaatttcaaaggttttacaggaactaataaataatcagtaatttcaaggcatcaatagagactgttgcaaatctccagactcctgttgatgttcttagcctgattttgcttttactgcaagaaataaatgaagttgtcacaaggaaagaaaatgaaaagttgtcacattttttccataccttttagattttctcaaattattacaaagataatgttcatgaagccaattaattctttagttaaaacgtgttcagttttatgtttaaaagtagattttgatcttaatcatcatggtaggtgatgtgggtttctttaagccttgtctgtgtctctcccttagtggcccactatgaacttgcttaagagatgtcagtgcttatggcaacctcagctaaaaggcacctggtggaaaggaaatgtggcaaatggcaatctgaaatacccaacatgtgctaagcatcttattttaccatgatttttttctgctgcataagggagaaaggggagaaaaagtgagatttaaaaatacaaaattaagtggttatcttagtttgttttctgttgttctaatagaataccaagacagaatgatttataaagaattgaggtttatttagctcacagttctgggggctgggaagtccaagactggtgagggccttcttctttacatggtgagaaagcaagagctttggagctcaagtctctcttcctcttcctataaagccaactactgggggaaccagcccccaatatttcaacgtaggttcttttctattttccctaagtgtcagccggtctgagaaatagagagaaagagtacaaagagagaaattttacagctgggcctccaggggtgccatcgcatattgataggaccgtgatggagacctcgagctgcaaaaccagcgagtttttattagggattttgaaaagggaggggatgtatgaacagggagtaggtcacagagatcacatacttcaaagggcaataaaagatcacaaggcaaaggcagagcaagatcacaaggcaagggcaaaattagaattactgatgagggtccatgtcctgctgggcatgcactgtcttgataaacatcttaacaggaaacagggtttgagagcagacaactggtctgactagaattcaccgggctggaatttcccaatcctagtaggcctgagggcactgcaggagaccagggcgtatttcatcccttatctcaaccgtataagacagacactcccagagcggccattcatagacctccccacaggaatgcattccttccccatggttattccttgctgggaaaagaattcagtgatatttctcctacttgctttctgcaagaaggaaaatatggctctattctgtccaaccccacaggcagtcagaccttatggttatctttccttgttccctgaaaatcactgttattctgttctttttcagggtgcactgatttcatattgttcaaacacccatgttttacaatcagatttcatattgttcaaacacacatgttttacaaacaatttgtacagttaacacaatcatcacagggtcctgaggtgacatacatcctcagcttacgaagatgatgggattaagagattaaagtaaagacaggcataagaaattataagagtattgattggggaagtgataagtgtccatgaaatcttcacaatttatgttcagatactgcagtaaagacaggcataagaaattataaaagtattcattttgggaacaatgtccattaaatcttcacaatttatgttcttctgctgcgggttcagcaggtctctccattcagggtccctgacttcctgcaacagccaccagtccatcatcatgggagccccatactaacgaccttatataatcctagttacttcctgttatggtctggctctgtgtccaaaacccaaatctcatcttgaattataatccctatgtgttgaggaagggacttggtgggaggtgattagatcatggggcagtttcccccaagcttttctcatgatagtgagggagttctcatgagagctgatgatttcagtgtggtactccctcgctttctcttacacgctctctcctgccaccttgtgagatgtgccttgcttctccttcatcttctatgatgattctaagtttcctgaggcctccccagccaggcagaactgtaagtcaatttaaacctctttcctttataaattacctagtcttgagtatttccttatagcaacctgagaatgaactaatatacttcccaaaggccccatctccaaatgccatcaacatatgaatttgggggttaaatttccaccacattaaatttggggcatatttcaaaccatagccatagtaaaggaaaatagaatattttaacttatgatccttttttaaaaaaagttactggagatgctttaatgctatcaaaaatctagagatttataaagctcacaaaggatttagctgtaggcaagatagtggggtcataaatgtgggagtttcagggaagaagtgacttctattgtgtgtctcctacatgccaggcagaggtgtaggcatattaattcttaatcttatttattatttgctataattttggatggcagtcagatggtattcttggggttttacctaaaaggaagcaaaaactcaatgagttaagaaactcgccctggtcacatagagctgtgtgggaagaatgaaattagaatctggcctgatcatgaaacccatgatctttctactgcatgacactgcttactgtaaactaggaacatcctagttaagatgcatgctttaaattgaacattggactaaatgaataacagaacggaatgtgagaaatgcactgatttgaactcctgtgtttgtttgaatcatatacattttcagaaacagctaaatttgagtggaaaatacaacagtgttgtaatccaaaatgtcagtttatacctgacttaacatttattgtgctatgtgctgagaatcccaaaggcacatttaattttattaaacacagtgattcattccataaacctaacagccaaggcagtgccttgtcatcttttgacaacttaccatagtttacttcaagtaactaaaagaacatggcatcttcatgctaactagggtcccagatgtaaatgacaacagcaaacatcttagataggatgtgtggtggtgaaggaagactttggtgcgtaataagttatatgatggatttggtgggagtcccagtatcttatgagggtacagacacatggtttctattctgtcttaattcctggtgattcttcagtgtttgtatttaccaaagataaatagacctttcttactttgcttttagaaaatgctttcccgaatggtttttcagagaagaaaatttgttaccagatcaatgtacttaaggaaatgaaaagcccttgattagcagccaaggagcctcctaatgaaatgacatttccctccagggatttcaagtggttaataaaatctagtgttctcggtgtaaagtgcttatgtttgctatgtctgctatgtgctgttctgaggtacactcataaacattgatacattaagtggagccccaaaatagatgaatgtgtgtgtccacgtatgtactggagcagaagctttatctacgtctcacacctgagttgtgtagttgaaggtaaatttaccctatgcacagcttcaaatgaactcttcataaacctgacgccttcagaggggaaggcctcacttactaacctgaaaacagcaatagctcctaaaatcctgaggagaatgtaagactgtatttcaaggaaaaactatgccctggaccagacaaagcaattaatgcttggagaaactaatagtctctgatggtttctacagaggcaaataaaccattagactggtctttattattatgtcatttaagtgtgtatataaatatataacgagattattgtctttatgatgtcttcatataaatgtgtgtatataaaatgctcttattttaagtcttagaaacccactaattctagtggaaagcattttaatgttacaggagagtttcacagcactcaagggcaaggatgcatttggaatcagggactagcacgttctctctcagtaaactaactaaggctctctctctctctctctctctctctctctcttctctatttctctttgtgcagcttcttcattcctctttcttgtggggatttctgtagcctccacaagaattgctagttgggcatctttcccattaagagaaacactttgagagtagaatctcttaacttcaaatgcagattcacagtagacagatttcattctattaaagcattgtgattcatttcacaaactgaataaccaaggcagcgctttgtcatcttttgacaaagaaccatactataccctaagcgactgaaagaaaacagtattcaatgctaagaatatcccatatgtgaattacaccaactgtgttccttgcctggcttcagacatctgccgttccctgagacagtgagctgtagccaggagcatgtcactgggccagtctaatgatacgaggacaggcttacttcccctcaagaagaagatgtggtgaagaagttccatttttctacttcagtgacctcttagagttagattttagttcaaatgggaccactgcatttcgtagccaagcttaaaaatgaacaattattactgttagtctttttcatatttcctgtgaatttgtccctgcctagaatgtccactccgccacccccttgctgacccatcactcaccacctccagagctcagctcaggtgctgcttcctctgggctgacttcctcaaccactcccctctgtacttccatgacacctgattgttcattctttaaagaaacgcttgtcacactctttagtatagaacctgtttgaagactgtaatggatgattcacgtatggagtatttcatttcagagactattcttaaactctgactcctataagtaaccagagtaacatgtgaataacacatctttatttccttcatccatttggtgttcactgaaagctttaccaaaagtcccagacacaaagacttcatagttttgccttcattttagtaaatacaaaaatgattttccctctgtttcttcctcaaaactcattccaggttcttagacaatcagctccatttaaaaaaattattttggaacactcgccatgtttctactccaagtctgaggcataatattttatgcatttcttttataataccatatacacatatctgggagaatgtttgagaacttttacaaatacaatatagagaaacaaagtttgcacttatagctcacattaaaaataagtttgcatatttctccccaaaactgggcagaaggtgtacctcattggtgtatccctctcatgttctcctttttatactcacaagaaagaaagcattatccagctgccctaattggcccccgtgtgaatagctatcccaagtacatttcttggggtgcatttggggtgtcgtagaaattctgtatatgaacgaactagaagaagccgagatcatgccttaaagaatacctcaaagatagcatacttcctgcttatatatatatgtatttggaaaaggatacatactttgtcctataaaacattgtagaagtggttttatttcttttagctttgatgtttcatccataaaataagcctcatcatacctcactccccagatggttgtgatggtcgctattatttatctgaaactccaagcatatattatcatttccttcccctttttcttcaagttaaggatggcactgagaagccagctcagggtcaccactagacatgtgcagggagaaggtattttacatgctgtacatacacatactcatctcctgtatatttgtgggagtttatttccactaacccactcccatcacttatatttaaagtgtagtgaccttcatgatttcctcaggacccctgcagggtggcaggcacaaagggagagtgaacaccaggaccaaggggtcaaacagagacccagcatcctcaagtggtgatttgcgtggtggtaaatgatttaaagcactgtttttatgttaattcaagtaaacaaaaagagaaaccacaaaaacattgtgtgccaactcttcccagacaccatggtttcagtccacatgcctctactcttggggtcgtgggtggacttgagaagcccgctctactgaatattagaaagagctgtgagcagaataacctaccgcagaggctagaatttggcagcccacaaattccatctgaagtgcaactcgaatgtggaaatcagtttttctctttaaaatttttcctatcattcaaggaaatctctagaaagctacagccatatcaaaaccgtggaacataacactacaaaacaaccaaatgacctgagttttctaggatagactcaaattaaaatgttcccatgaatatgattgtatttgtcagagtatggactccattttttggttggtgaccttacctatacctatggaagaagcatatgatctgggactagagagaatagtatctcactctgcagataccagtctagaataagaggtagcattgaggttggtgaacctacagcaatgggctgaaagcgctagtccttaagctattttctgtttcatcctgcctgagagatgagtgacttagtggccttaacagagggtgtgttagaatgtaaaaaataggagccgaatttacagttttagagagtgccctggggatgtttacagggatcggctgcctgtagctgtgttgactccatggatttttgttgctatgctaaacgtattaaaagctttgaattattgtaccctgaaaggatttgttcattcatcaaacaattatcttctggtataagctaagctctatgttatgcaagggtccctgttacatacatgaagtttttctctacagtcttatattagtcagggttctgtagagggacagaactaataggatacatatatgggagtttattaagtattaatttacacagtcacaaggccccacaataggctgtctgtaagcttgaggggtaaggagagccagtctgagtctcaaaactgaaggacttggagtctgatgttcgagggcaggaagcatctagcatgggagaaagatgaaggctgggaggctaagccagtctagtcttttcacattcctctgcctgctttttattctggccgtgctggcagctgattagatggtgcccacccagattaagggtgggtctgccttcccagcccactgactcaaatgttaatctcctttggcaacaccctcacagacacacccaggattaacactttgcattcttcaagccaatcaagttggcactcagtattaaccatcacaagtcttttacacgatgtaatatatatatatgtgaatatgattttaaaaaaatcccaaaaggacagcttgtaagtgcaaccccttgcttattcctgtctcatagagatgaccgtgagtcaatccacctttcctttataatcatattattatatttccttaaaggaacgtaaaagaatatggaaccactttaaaaaatacctgtttctaaataaacttgtaaacaccaaatcatggtctttgtggtagttgaaggtgaatttcttcatgtctgggaagatacaggttttccgagtttaacaatagccatgtcagaggcaaaatatgaaagataagctactcatcttctccactctaaatgatttttaacaagtgcacctggtatcagccgagggtccccagagaatatatgttttatacataaatatggagatttattatagaaattgcttcatgtgattatggcagccaggaaatcccacgatctgctgtctgcaagctggagaaccaggaaagccgttggtgtctcagtctgagtctgagagcccaagaaccagaagcaccaacatctgagggcgggagatagataggtgtcccaattcaacctgagagggagtgaatttaccctcgtgtgccttttcattctattcaggccctcaacagatgagatgatgcccacacaccctgggtaaggtggatcttttttattcaagtctatcaattcaaatgctcatctcttccagaaacaccctcacagacacactcagaaatcacgtttcaccagctatctgggcatcccatagcccagtcaagttgatgcattaaaattaaccatcacatgctcttaagcatatttcaacccgactcaatagaactagagtcttgtaaaacatatgatatacacacttcagtggttttcagcacaggcagttgaccaggcttacttgttcaaagaagagaagatgggtttttaatagcactcacaaatcaaattcattaagtccctattttgatgtaggagaacagagctatcattgcagcaaaattttccaaggccagtgatgccaggataccaaggagctacatgctgtcatttgcttgggtctctctgacaaccatgaagacactgtcctctttccctctaacaacttgtttgtaaaattgttagactctcgacatatgggacaagtcagcagaatgttagacttcctataatatctcagcaagactgccttgagaactcatggcatgtggatagttcagggagttgtgtgtttttcccaactcagtcattaccaattgtacatcccacatgaaagtcactttagcatttttccatattttagggggaagtggtgactcatgcccgaggggcaggatgagaatataggtctcataggcatcttcaaaccaggttcgcctctgctccacatttgtgccatgaaagagcttcgtttcataacaagccagagaccaattctaaatcagtatctgcacaggcctgaagaattgaaggcttatgcaatagcagtcattgccagggtgggtgtggatcaaaacgcaacgtagaaatccttacgccattgcaagcagcttgtctcctctgccccagttgttcttgtaattttaacaaccatatgcttatcttctgttttctggcagcctagaactgttcttcatttcttttttagactcaatagaaattaagtggtttggccatcaacattcctgtctgtcgtctctcagtcttctgtgaacaggaccagatggaataagctctttgatagttacacattcattggaattgaaaaaatgggcagctgattttctattttataggcaaagtcccaggcctgcccctgtgagagtgtggcctgctgggctactgtcttattctgcaacaaggggtgaagccacaaagattatgtctaaaagagtaatcacagagacaggacagggtttaggcagaagcaagaatttcagagcatgtgagtgaggaattatctgcactggagtggacttattttataatgggaaaattctcagaatctcaaaaaaaaaaaaatggcagggagaggaagagtggcaggcgacaatctaacccagtttgtgacttggaattcataaattctttatctgtcgattggacagaaataatgaaaaagacttttttcattaaggaaaatcctacttcaaaatacaatgggctgagccttgcagtgtctcaagtcggaattcgcagtgggtttggggaagctctggtggctccactgggtagtgtctgctctctagaatggcaacagggtcaacaagggtgtgccaagatgccaggagctttattagaccctgagcaggaaaaagctactctttcagtctgatggagccctaatctgacagggtcctggaacaacagtgcttgtttcagtaagggccagctatataagaggtggttctaacatcattctcgtgattgatgggcattgtccaaaataaacaaaacaaccaaccttttcgtaccacctagcagctgtcaagtccctgtgtcacagatgtgtcactactgtgtgcttctttaatataaataagccacagctagtgaaagggctacaagagatattttagtttggttcatctcactgcatctaataatctcaagtaacttgaaaatgtttaggatatattatctatagaaatgaaacagtactgaacccagcagacttaaccgtcagataaaaggctcaaactatgtcaagaaatgtcctagacaggtatggtggtggctgcctgtagtcccagctacttgggaggctgaggtagggggatccattgagcccaagagtttgagtctagcctgagcaatgtatggagaccctgcctcttaaaaaaaaaaaaaaaaaaaaaaaaaaaaaaaaaaaaaaaaagagatatccttataaagaacatttaaaacctggacttaattctgaaccactagaatactagaatcttcatttgtgtgacagtttttctaagacttttttaaaagtttacctttcataaatttgcatccatttgaatttttatttgcattcaagttgatttcctggtttcaaaatcagtcacagcagttgttgacatggaaaaaaaatttgccaaagcaaaagttgagatggtgtgtcacaaaggatttcatgaactaaaagttaccattccttgtccaataacttttacttctcttttattccatgatattaggggttctgtggttaaaggcactcaggaatccctgcaggttggctttccccagaatacccttgaagcccagaatcatcatggggaccactacagacttgacctggatcctagggcctttatgaaaaagtcatcaccgcgcatccccttctctgcctccattccactgtactcatataatttcggggtatctgagactgcagcttaaagcatcattctcaaggagtctctgagtctgtcgaattttctgggtggccccaatcccaaaccatgacctggggacaaatttgggggttcttaaatttctgggagagttcagatcccacaattcaggccaggtcagccctgcgactcggcatgaatgtgagaagcctgcggaatgccaaaggactgatagctgtaatctgagacatgctgtttgctctttgatgagactagccatcaaaaacgatagcagaaaaatctcaatccttgccgatgaagccagtttctacctgatgaacagatctcctaagatgtgagcccagtgcttcttcagttcattccagggctctagggtacaacttactgcttggaataactcattgctaaacagtctgcagggtttaaattgtcacattccttatggagtcaaggttgctataatcgttgctgccgtctacagcagctctgggaagggcaacagggtggagtggaatttcacacatgccatatgtcgcttactcatcctgcgagatctggcttggacttgctgcagttgggaggagaggaggatgtatgtctggatgatacaatcacagggaccccagatcctgcgaggatggattctgagctataattgttcaccattgacgcatgtgttcagcttgattttctggtcctggcatttcggcactcagcagtcacctccacactgggcagagtgagaatttggtgcaccaatccaaaagatactgaaggcattttaaagggaaaccaattcagtcccttttctccaatcccaaagaaagtgtccactcactagggagaaataacaaaattagattttgatttcttatcttagaacagattgtttcctactaattgaggctcaaacacaaagtggtaaaaagtccactggagcagacttacattatgatgggaatactctcagactctatcaacactgaatctgttattaaacacaagataagtgtaagttttggggacagaagttatctaattgttttatcctttgccatgttttattataaaaaatcttgtctctatcgccactcccgccacaccaaagaatccccagggagcatggccccagtgagtcatgtttttattctggatatcctcatctaccaaaggtgttatcattctttcctttccctagtttttatttgacaaatagggatttttctctaaatttaaatatcataaataaaattttcaaacacaaatgcccttggagattctgaatcataactccattctcccccttccccctctctcccaaactttccctggtttgaattacaagcctagggggaaagaaataacagtttaacttgattaatggagcactcagcagaagcacccgcttcctattctctgccttgctttctacctcattgaataaatgtacgctattatctcagtctcgcttcaggctttaccagtgaaattgttcccaataggattgccaaagcccttttggttagccttaaccaagtgatagtctcagtcatgttttaaagtcaggtttatgaaagtataatttatatacagtattcaccttttttaggagtacagataaatgaattttgaaaaatgtatcaaattacagaacttccaacacatcaatgtgtagaaaattttcatctcttcaaaaagggtccttggccccattcagttgattttctttctgaccccagcccctggcaaaccctgatctgctttctgtccctatagttttatttttccagaatgtattattagtggaaacatgcaatacttagtcttttgggtctggcttctttcactggcatgatgcatttgagaggcgtccatttgttgcaactatcagtggccttttcctttttgttgctgagtaacattctgttgtatggatgtaccatcgtttctgtatccactctccaggtgatggacatttgtgttgtttccaggttttagtgaccatgaatatagcctctataaatattcactttcaggtttttgtatgaacatatgttttcatttctcttggataaatgccaaggagttgggactgccaggtggcatgaagtttatgtttaacagtatcagaaacgatcttccaaggagtctgtactattttgcatcaccactagcagtgaatgagagctcctgttgctccacatccttgtcagcatttgatattgtcagattttgttttgtttatattttggccagttgaaaggtgtgtaatagttttcatttgcattttcctaatgattaatggtactgagcatttatcatgtccatatttagatctgcatctcctctttggttaaagtacctgttcaaaacttttgcctatttttttgcttctttttttaaattgggttgtttgttttattattgttgagttgtgtacattctttatatattctgtataccagcctattatcagatacatattttgtgaatattttctccctttctgtggtttcccttttatttagcagagtattttaactgtgatcaagtccagtgtgttaatttttccttttatggcttgtgcaatttgtgtgcaatataaagcattttttctaacccaaatttacaaagactttctcctttgttttcttctataaggtttacagatttttttattgttgcaaaatgcacataatattaaaattaccattttaaccactttaaagtatgtaattcagtgatattcactaccttcacaatattgcaaaaccaacatcactatctacttcaaaaacattttcatggccaggcacagtggctcacacctgtaacaccagcactttgggaggccaaggtgggaggatcgcttgagccgggaagttggagaccaacctgggcaacctcgtgggactctgtctctacaaaaaattaaaaataaaaaattagctggggggtggtggtgtccactagtagtcccaggtactaggggggctgaggtgggagaatcatttgagcccaggaggatgaggctgcagtgagtcatgatcaccctgctgcactccagcctgggtgacagagcaagaccctgtccaaaaaaaaaaaaaagcattttcatcatccctaaaaaccccatacccactaagcagccaatccccattcttctctttcgccagccccaggcaggcactaatttacttcctgcctgtatggatttgcctcttctgagtgtttcgtataaatggaatggaatcgtgttacatatagtctttcgtgtctcactctttcatttagcataagttctcaaggtttctacatcttggagcatgtatcagtacttcattcccttttatggcttaataatatttcaatgtatgaatatgccatcttttctttattcattcattaattggtgggcatttggtttgtttctaccttttggctcttgtaaataatgccgctgtgagcatcggtgtacaagttttgtttgaagatctgtgttcactttttacacaggagtagaatttctgggtcatatgacaattctgtgtttaatttattgtggaatcatgaaactgttttccacagtagctgtaccgtttcacatccctccagccgtatatgagtattcaagtttcttcacatccttagcaacatctgttattttctggttttgctgttgttgttgttattgtcattctcatgggtgtgaagtgctctcttattgtgggtgtgttttgcatttcactggtgaccaacgctgttgggcatcttttcgtgtgtctgccgatcattcgcatatcctctttagagaaatgtctctttgagccctttgcccatttttgaattgggttctttgtctttctgttgttagctttatagttttgagttttacatttagctctatgacccattccaagttaatctttttgtatagggtccagtgtatttatcagtgttcatttttacacatatggttccagtctttgtttagcaagactgtcctttctccattgaattgccttagcacttgtgttgaaggtgtgggttctgttctctcccactgatctatgtgaactgccttcctccaaggaagggatgtgttatctcatatactcatagagtgtacagtcttcaacactgtaggtttacagtgaggtcatgaaatcaggtaggtaaggcctccaactttgtcttctttctcaacattgcttaggctattctactttctttgatttttcatacaaatttagaataaaatttcccatttcaaaaaatagcttgctgggattttgatggaaattgaattttaattgggatttattgcactgaatctaagatctatttggagagaatggatatcttaacacaactgagttttctcatccatgaacatgatatatctctccatctttcaggtcttacttagtttcattaataatttatagttataactaataatttatagttttcagcatacaaagcttacatgtatcttgttagatttatttctaagtattttttcagtgctactgcaaatggtattgcttattaatcttcattttctattgtttatttctaccatatggaattattgatttttctatatttacttatatcctgcaatcttgttaagctcctttattaattctagtagcttgtttgcatatctttgagattttctatgtagacaattttgtcatctatgaataaaaaccgttttatttctcttttattctatatatatcctgggttttttaaatctaattgctacagctagaacctccaatacaataatgaataggaatggtgaaagtggataccttttccttgttcccaatctcagtcctgtgttaactgctgttttgctttctcttagtgaaactacctagacttttgtgaccccacactctccggattcccattgaatcatcctccttttgtgggggccttttcctgcagctgcctttcagggtagttgttctacaaagtcttccataactcagtgctctgttctttctacccacactccctgtgttattgcatatactcatggtgtacccagtgtcacccatgtacggactcctaattccatattcagtcccagaccttctccagcagtcttatttatctaattgcctgccagctgcctgtcctagaagcatgttaaatttaatttttttttttttttttttagacagtctttctctgtcgccaggctggagtacagtggtgtgatcttggctcactgcaacctccgcctcctgggcccaagcgattcccttgcctcagcctcctgagtagctggtactacaggcatatactaccatgcctggctaattttttgtattttagtagagacagggtttcaccatgttggccaaaatggtctcgatctcctgaactcatgatccgcctaccttggcctcccagagtgctgggattacaggcatgggccactgcacccggccaaatttaatatttttaatatttactccatcactcctaccttctctgtttgcttccatgggctggtttctctagtgactatttttcaacacaaatctgatcaagttgccccttagccccagtgtaccttttaatgtacgatataactttcatggggtgtccagtcttcaacactgtaggtttacagtaaggtcatgagatcaggtaggtaactccttaccatggctaagaaggcctgcatgctctgacttttagttaactctcaggtctcatcttctgacactttccttcttgtccactctgctctagtcacatggacctccagtctctttcttgagccaaccaagtttgttctcactttaaaccaaaagtagatctttacatgactagagctttttggacacttaggtcatttaggctcacatgtggcctccttagtaagattttctctattcagtctaagaggaccactctaccacctacacatcgtctttcatatggtcttctgtcattttattcctaacattatcatctgaaatgacattatttaattattagtttcttatatcacttatttctccttctaggagataagctccttgagggcaggagcattggtcattttgataggagtccctgtgtctggtgcctatagcactccctgagcacggagtagatgttcagtaaatcatgaatgctgaatgaatgaattaattttctaattcaccgtccacctggtcacctaagccagaaacctgggtatcagttgattccaacagtgtttggtcagtaaaatagaaagcactgtagatattttaagcaagaaagaatttagtacagagaactgggaaattatagaatcaattaaaagccttaaagaagcaaaagtcagagaagccactgctagtctttcgggaaacaaattgcaggaattctgagggacttttaccaaaggtctcacctgtttacagcaccagagattctcaggagattgtgcagaagctcctggcaaaacctcatttgccatctgccaaaacccatgcacctactcactgttgctgcaaaataataagtttccttttcttctgtcttccgcatctttcttggggacctccatgggaggaacctaacatgagatcctgctggctagtaagtgaataatctggggctctggcaccttcaatacagaggagagtatagaagggaagaaaggtattgaaacgctgacaatccagcccaggaactcacccacctctaatacacgagcaagtgcaatcgattttacccaacatttccctcaaatatctgaatgtctcacctccactaatctccccccaacctttgcctccacttaggccctcattgtttttggcaacaactaactgttgtgcttttcttcagccttgttttcttaaaataatctaccagaagtactcctctgactgtgttattacccagcttagagtcatcaatgcttgtcatcacccacaaggggagttcaggttccatagctgagggagaaaggcctggcctttaacatctttgttcttccgcaatgccgcacgccacacatttgttgacctctttgctttgcttcgtctcacccacgttgccttctaagcttcctgccctcttccacctgacttgcttattttttaagacatggctcaggtgctacctgccccaggacactttgctttacgccctctccctcccctccctcttgcccctctgctaacacccccacccaaactgagtttggagcatctctccttggtgattctgttctgatgatatgagtcagtctatgggtctgcctccctcctagtgagtgaacatcttccagagctggattctgttgccttcatctcggtatcaagtgcctgcaatacaaagcacagagcaatggttgaatgaatgaataaatacatgcacacagaagtacaatgtgcattagatccccctaattattttttaaaggctgggtgtgagaaagaaatcgaattgtatttgaaagagggccagtacttcacaggtctcagagatcatcgctggtatttttttttccaagagtcacacatcttgtttcctcctgcctagttggatttgatagaagaagaagattggaatggaactaaaagggttttgaaccactcagatattctacagacaggtttagaggaaattagtagcagggtcatggatcagctatgcaagatactagcatagttattcatctgaataggagcagtcggccacacaagagagatgcttatgaaagaaccacaccaaaatccagctagattctatcttgtatgaatgagagatatttttggtctgcaaacaagcaggcattccataccttggcattctctttgacccatttgtgtgaggttgcctttctcagagcatttccataacacgggaaaattgacttttgtttgtttacccaaacaatattcttaaaatgaacaacccctgttcatccacaaatgaccgtggaatctcgctatcactctttgctactggtgacctctgccagtcctcccaggctgtagagctgtatttacacctcacagagaagcactggggtgaaactctgcgtggagctgtgctgctcagagatgctcctctcctctctttccacttctttcttccacagggtaagactcatgctgagaggctgacgatatcctacatcgtaagcacatggcaggatgctttatgtctccactctgcttactggagccctctcagttctgttctgaggccagtgtgccctgtgtttatgactccatccctctaaggatccttctttaaacaggccaaacatctaacgctgctacaatttacctagggtttcttgttccacctcacccagacccaaagcactgaatatttcagtttgtacaaactgcctttattttatggtggttcagcttttaatttacattttagagttttatacgtatgtcctttattgtacaggactcagaagacagtcccatcgaaaaacaactctttacagcactataaacaaattacaagcacataaagcttggagtacattcctctcttaagctctccccaggcctcctccctagggagcgctcagtgtgctccggcttgttcttgggaactctgactgcagaatacgtggatgttgtaaatgcagcagaaaagatcccttgcagccctcctactggaccgacccctggggccagggtcattgtcttcagaactgcagtaaggaaatgagtcctgggtaaaatagcctgaggaatcccagcgcagtgttctcaaactgtttcagtcctggtctaatgactcatttggaaattcttagaatcttactcatcttctccatgccctctttctctgctccaagccagcggctgaggttaagtcagaggcttgtatccaagttaccccgagtgtttgccatttgcatttgtcttctgacttagctcccctctgcaagtttaaaattctttttcacaatggggagcataagtcccaccgttactggatctttctgaggacagactgcatgttatgagaaagagcagtgttctccccttccttgcaaaataacatcgtgcagtgttggggccttgaagagtcagtgcctcaaaggcagggtgagaaagagatgtccagtttatgccccatggaaagcagcggtgcctgctggaaggacaaagaaacaacatagaaataaacaccgtgagaaccctgtggtggctgagcacacgtctttgtgagcatacgtgataccttctggtgattctgaccctcttggctgctatcagagacaggaggttccatgtcaaagtggtgagagtgaaatctggattgttactgttacttaactaggacttaactggtttccctaggacagagagcccgaggcagaggcaaagcttacatgctaatactgtatgcgaggagatagcggacatgccatcccaggatgcaagagtgaaaggagactgaagacaaggcaggaaaaaaggcaaagcaaatgcaaggtgacacatcactgagctgcccttagtttctcaagagcttttgggcggctgttgtgtcacatgggagtgaggccctaatggaactactgcatctcgaatctgctggctctgccctctgtgtcctctctgagggccagtgtcaattccccctctcctccaggctctcctccgtgagccccccagacagcccttggggcaaccagcgcatccgtgagttgaggagggtggagaatttccagggttctgacgcccctggcatgatggtggcctgcccaagcccccaggggagctagaggcaacccacagcgtgaggagatgagatggcagaggctgcggccatggcttcacagccatgggaacagagcaagttatagctaggcccactgcagccgggaagctgggcaggaagctaaggcctgtgggcggggccagccaggcctgggtgcaggtagtatgggtcccgcacaccctgctggggagatgcaagggactctggctacaaccaggtgctgtaaattataaacaacacaaacttagaaaagcatcatctgttggaattagtgtcaaatgggaaatgttataaaagaagctgtagaacttcagtagggacacagactttcagaccagaggaaatggaaggctgctagagactttctccacattcaaagaaaagcaaacaaacaaaaaacttcaagtggaagaggtgggactggcccaagcagccctacaaaagaatccagaatcttttttgttctcaaagcaatgtgggttttttttttttctattaaagaaattatgcctttggggatagtctgtatagtcttagagtaatttaaatcatttttcttttgagattcttttcatatttatgattttaatactttatgctgattaactacatagagattataggctttgcaaaaggaatatctcagcctgtcacagttacatttgtatgaaacgacctcactgcaggaatgttaacaattgtattagaggttccgtttctaagtttaaataggaataatctacctcaacctattcagttagaacaaaagccacttccgcaaagcaataagcatgtatcttcttccaacctagttgcatttgattaacgattgcatgagaacctttctcatacttagcttttcacctggggtttttgaaatgcttaagaaaaaaactattaaatacaagcattttaaagctaatagtttccctgtttctaaaatgtgaaaaacactagaagctgaaattcagcagtttcaaaaacatatttcaggttcagttttcccaggacagctgcaatgcttgctggaaagtcaatgacattgcaacttgtaggcagttctggcctttcatcttttttttttctagggacaaatagttgataggatctgtttgatgtaaaatttaaaaatccatataaacttggcaattttccggagcacatttgataggagcaagtttacttagatttatgtaattttgtttctggtgcgtataaagattagaactgaatgtgaggtcctatgcagaggcaagaggtataatgtgaataatataaagtctctcttcaaaacccttcactcataattaaatatccataagtgaagggcagtaagtagatgttcaagtgctgtgtgaacagaaacaccatacaactttagaattcgaggcagcttagctatctttgtgaactgaggactctggagtcaagaggtcatgggtgactctccctagatcacagagccagtttttagcaaaaatgcaccttttgttacactccaagttctcgcataatttctttgtctctacacttttaagtgttaaaattcaaaagaacatttttctataaataatgtggacaagaggtatttgatccttgggtgtgactgacattatagttacacagtgtagtgtcaagctctggtgcctcatgagctgggtttgaatagagaccccgccactttctatttgtgtgaccttggcaaattatgaaactttctgaggctcggtgtgacacggggataaaattcatgcccaattcataggttcattgtgaaaaagaaatgagcgatttccctaaagcacttggtggtgtgtacattataatcacttagtaaatattgtttgttgttatttaaattgcttttactaaactattatgaaagacttttctgctgtttgtccttctaatcactattgtctttgtctgtgtcccacctgacctctcctataaactgaccttttatctgtctactctgatgagagcaatggcagagtagctgctgctttgagcagaaagtaaagccgtgtggaagggtacagtgagacagtgtgacagggaaagctttcagttagcctcagcaggtcagtatgatgctcacacattcacttcccaactgcttctgtaaaacgctccatgattcttcttttttaagcaaatgagaaatcggttcttgatctgagtcccaagtagacatctgtagctcttcacctaaaccttttaatcagcaccacactggagctctgggtcatcgtttattacattcgtatttgggttccccagcaatattattataaataataatatttattaagtgaatattcacttatttaataataagtgatatttaataataaatgaatatttacattcactattttgggaacaagaagagcagcaataagctggattatcatgtcaacaggcttgatattctccttcacatctgtaatagacggtttatgggacttcttcagggaaacaggccgggttgagcctcctcagacactcctcatcttgggaaagtaagtctcccaccttcaagggaggttttcaaaactatgagtgttggctccagtcccatcatgttggttgctgagaggagataaactggctaaaggtttcctaatacttagtccccaatagctgaacactgctggtgcaaaaaaaaaaaaaaaaaaaaatcctttcaaaattggcaaaaatacaaacaacaaaatttaaaatctttccatcgtgatcaccttttttgaacagtgcgcaaatgaattgtcactggaatttttacttacgtaagcacattctaatgttctgttgacaaattatttttccattgtaatctagattcctcaggggaaaaaatgtcataagttcacctgaatgtgagataatatggtttcattccatcttccactaaacaagacaataaaattttgaacaccgttagaattgaaatgttctttaatttagtttctgtgattaagcaacattttaaattttaaattctatggtttacttcctttctcataaaatgattaaaaattgtttttggagactgtattagttcattcttgcattgctataaagaaatacctgaggatgggtaatttatcaagaaaagaggtttaattggctcacagttccacaggctgtacaggaagtgtggaagaatctgcttctgcggaggcttcaggaagcttttactcatggcggaaggcaaagggagagcaggtatcttacaggcaggagcaagacttagggagagattggggggagctgccgcacacttttaaataaccagatctccagggaactcactcactttcacgagaacagcaaggggaagtccacctctggtgatccagtcacctcccaccagtcccacctctaacacgggggattacaattcaacatgagatttgggtggcaacacacagatccaagccatatcagaaacgctttttggttattttataactttgcatgttaggtgcattttatgacttataaacatctttggaatatgctttgaaaaacaatagtgtaggggctagcaaaacgtgattattttttattatgtacaaatcaaatcaaatgtatactgatattctataatattaattaaaaatcacttttgagttttaaaatgtataaggcccaacctaggaattaattattttaaatagaaatatttacattcactattttggaaacaagaagagtagttctcatttcatgatctagttgctcctctatacggctggtagaagggtatacgtggagcactgattacattctgcctcatttgagaacaatttaactattgttttcttctctacatgaatgtaaacttttcaagagtaggtagggtatatttttttttgctcttaagcacatgatagaaacgtgtacatgctaacaatacaccataaagtatgtgtcttatctaattaatgtgtcctaagtgttcatatggtttggatctgtcccagcccaaatctcatcttgaattgtaatcctcaatgttggaggtggagcctggtgggaggtaattggctcacgggggcggattctatggtttaacaagatcctttgccttccaccatgagtgtaggttgtctgaatcctccccagaagcagatgccagcatcatgcttcctgtacagcctgtggaaccacaagccaattaaacctctctacagcagcacgagaattgactaatacaggtgtatatattttatactttgtgtttacttatgaagcatacatttgaaggctgtttaaacattattttatcatctggatatctattaattggcatttccaatgtcataatttatgttcatactgcccattggttaattctagaactctttgtggagcatatgttatgttccaggaatcagactcctggagctgtcagtccaatgaggaagatagacactatttatatgacgcaaaaacatcaagtgcttttgaatgcaatatatgaaacgaattatttccactatgattgtagtgttgcattttattacattttcatttttgtattaactgaaataaagattagttgagaatgaatatgaaatattaattgaaaactaaacattaaatttaattgaattaaatgtcctgtgtaaatccttataaaaccctatgaatttgatactataattcccatttttcatatggagaaatatgatgaatcccatagttatgtaattttaaaaactgataatccttttgtattttgtgtattgtagtaatctattatccaaagtatttctttttcaaaccattccatttaaaaagtgtgtttaaggcatatattaattacatagtgtagtagcactaattgcttaactggtttcatttgaaaggatttaattaggcaaacttaaaagcatagaagccacagtattacaaggtgataatcccaggagccatgtacatgataccatgtaattaatttgaattaccaggttctggaatgcttaagctttgctggacttttagaaacaaaggggacagtgacctcccatgaaaggaatgctgtggataagctgatcagttacttatcagccctgctattgtagctgtgccaaccagacatgttcacattacttggacacaatgtgcatggtagttatagtcagatggggtggtacagataaaatcatgacttcattttccatggataacttatcttttgttctttggaattagccattttaagaccacatatgaagaaaatgtgataacaaaaatgttccaactatgtacagtagtgcttttaatactctgtaacagctagataggaaagaccttagaatatcaaaactgctttaggtttctgccatcactagaagaaaagaattttatcaaggatgtaaacataagtttcaaaaaatattagacctcagcattacccctgaattcggactaatcatgaatgatagttttatcttgttcagaaacggtctccaacctatgctgtgaaagtaggttactgttctctcaaagtcctttatggggaagatacatatacacttttttccacaggagaactttgagcaaattgaattattacaaggaaggtttcatagactgctggtaaccaaatgtgcttttaaataaatcttcagaaaaaagttacaactgtgcacatcctagaccaattttaagcttgggatgagagtaactttaagatataagaaactgaaattaagaaaaggaataattctgtttcatcagctatcactggattctgctttaacctataataaccaaaacaaattgtgaccaaaccacgtccatggtgaccaaattctcccatactctcatttgacacaaatcaaaatcattgacttctaagtcaaaatgtggagtttatttttaaccagccaagatagatagaagtaaagtaagtaaacataatcttattatagttggtcagggtaaatttttgatttaaggctatttaatactctaaggcttttaagcaaaggtagaatcttaaaatctaagaaaataatacaatcttttttatagatatgtaacagcatcagatggggtttttacataaagttagatgattttaaatcttaactagtgcctagaaaagattccagacaagggaatgtctacctataacatgattcagcttaatttagggaaaccatctatcatggcataagtgcaaagactgaaagctgctgccttaccaagtgttaatattcaaagaactaatattcgtaagtttcaaatatattgaaattgcttctcttcaataaaaggattgatcatattaaaaccagagaacacaatactggtaatactatttaacatttattgaacagttagtatgtgccagacactatgctaagccctttgaaggagttacttcatttaatctttcaccattttaataaggtgctagtattagttccactttagagatgacagcattgaggtcttgttgacttcacagttttgcctcagttcagtcctatttggaaaaataggaaatgtattttttaaagcactggtaacatctcagagtgtagtggaaagaatagaactttaggagtcaagagaactgtccttcagtctccactgtaagctccctgagggaaaggactctgtcttggttaccactccatggccaacacccgtccacatacctgcggcataataaaaacttagtaacccttcatggaatgccggactcactgaaggagagcaggtgctgcttactcaatgtgtgatctggccaggtgatttaacccctcagggccctatccatttgttattcctttcctattctaacatcttccttgttcctaaaaatgatttgaggaaacaaataaaggattcagctgcacaagacctttaaagtaaagataaaaggtcaagagtgatgtacttgaagaagggagaaaactatttccaaagtcaaggctaagaatagctgcctcgtctgggcatggaatttagactgaaagttgctgcagcaacagagcctctgtggattgaagccaccccacctacccgctcttcttctgccacatttggccagagcaatctgctcctgtaggagtcttggaggaaagaagagaagagcccaaaatatcccttttgctgtctaattatttttaatgactaaatcatcccagttctagatgaccatgttgggtccattttagagtgtacgatcaagtgtacgatcaaaagttcaaatggcagaaaaaccttgagaagataaaaggctactttctctagtgaaatctgaaacaccgtgttgaatggaggaattagaatagcgcccaaataaggaagagttataaagagcaggtctaaaaaaataaaaaagaaccaagtcacagcaaaccctaagtacccatatagtagcacaagttagctctgggcctttctagcagaatggctactggaaacaacagaggccgtgagaaaaatagtagaaaaatgtccagccaccctcacacaaacccagcttaaggtgatggctaaccgccctcaggagggtgtttgttttgggttcagacagggcaatttgataagaaaagaatcttagccaaatggtgagaaaggtaaataattaaccatgttacttcaacaaacagcaccaacccaagacatttgggttacacttgaaaaaagaagcaatggaactagcaagtctctatcctgagaaaatgttcttgatcctttggccatgagcttttactttccccgaagaagccactccctttcttaatttggttgcacttcagagatcaaaagggggcctcttccaacacacaaaagatatgctcctacttcttcagcgtttatgatgatatttgttcagctgcttccttccataaccattttctatttgcagactcaaaatcagatagtgggtgattcaaagagctaggtggcaaaaatgtgctgacccacctcacagcacctatgtgtgctgggtttcagacctctatatggtcatcttgcaaatccattcattgggaaaattccaatagcttagtggctcattctccaaactatgatttgagagcatctagagggccaaccagaatgtgcattttctcactattttcctaagcaccattcaatgtgctacatctaggttaataatagtaatcagggaaatcaaagaaaaaaatgtgaagaagtcaccgtttgacttggaaaaatcaccagtacaaatgtataatcaaatggcatgcgattacaactgtgcctcttaacactatatcatacctggggcctggaactcttgggaaaattatagtggaaatttaaatttttaatttaattaatatatagagaatgcaggagtgttaggtatccttcccatactcttctttctcctaattcagtaaagtcatttgagctgaagatttaaatctgaaaaatccaattatttattttgagccatgcatttttggtagcactaaagaagttgggtagagaaattagcaaccatgggttgtatagagcagatggctggaattaagaatttatgaaaaaatatattgtgacattatgaaataatttttcatggatgttttagcttgatgtgtaagtaccgagtaggtgttcccatttaataaataatgactatgtgccagaaattaagagcaaaacttaaaagaaaactcattcttctaccttctggagagatgctcactctgcctcatttattcctttaatgtcatctcttggtttgtgtgtctgtgtgtctagtgggaacggggatggggatgggaataacagagcttttctctctctgtctcattctttctctcttttctactttctattgttctggccaatatttctgttcactttgtgtgtatgtaatcacattaatggtactgaaaaaaaatcctgaaaaaagattagtatacaccaagatctcaatagctggaatctgcatttcacacagatctcatagatactatgctactgttcaaaaaagccagctgcattagtacaaggatagggaagatatggcttaaaaacagagcttgatttgccaaccacatcacaccgtttacccatggagctgagagtccagtattttaatattagaccacatgtatagaggggcccaacagcaagagtatgatgattgccccatcctgttttacatggattagaaaaaacttggagcaatcttcgcaattgaagaggaaaagaagatattccaaggattgaggccaggttttggctttgaaaaggaacaagttttggaaactgagcacatttcaaaaaaagcgcagttccaaaatatgtatgtgtcacatatggaggatggattaaatctgatctgtgttgtcccataacatagcaatgggaccaataatggtaaaagctgtgagaaggcagattccagccacacttggagaagtctctggaaaagaacaggatgcttgaaactgtagttgcctccaccacaggggatggcccatcttggagtgtggctggatagtgacttgaatcgcctgacctgcaaagcccttttccaccctgggaatctatcattcaataaaaggaatggcagtagaggggcaattgatgtggggaggagggatgtttgatatggaattgatgtacagtgtctgccacttgggacatttaggatctcgtgttgctgtgatcggtgggcgagccatggttccctgccttccctgaggttaagctctaatatttttaattttgtgctacctgtcagggaaactctgtcttttctttctttgttgtattatagaaacgaaatgaccaggagccttcaaggatttcttgaaggccatttcaagcccatgataatgatgatgatgataatgatgattttagtggatgctacaatccctcatctctccctttcagaactaaggtgtccactcacccagctcccagagtgtgcattgctgagggctcacaagtgagtctgtctccaagaatggcctcctctggttctgcgtctcctagtgtgggcagcctgcaggcagtgggtggatgcagggctcccaaggtccaggctccttgtcttcctttggggcaactagaaggtgttatctcagcaccatagcatcctgtggcctctgctgaagatttatcaaagtttactttctccctttgtccaatttttcctctcctgctcccttacagatatgataactaaggacacatccccaaagccccttcagtaaatcccctccttaccgtgtttttagagaacaaacctaatgcagaggatgatgatggtgatgatggtgatgagatgatgatgatggtgacgatgatgatgatggtgatgatgatgatgatggtgatgagatgatgatgatggtgacgatgatgatgatgatgatggtgatgatggtgatgatgatgatgatggtatgatgatgatggtgacgctgatgatggtgacgatgatgatgatggtgacgctgatgatggtgacgatgatgatgatgatggtgacggtgatgatggtgatgatgacgatgatggtgacgatgatgatggtgatggtgatgatgatggtgatgatggtgatgatggtgatgatgatggtgatgatggtgatggtgatgatgatggtgatgatgatgatggtggtgatgatgatggtggtgatgatgatgatgatgatgacaatgatgatgatgatgatgatgatgatgatgatggtgatggtgatgatgatgatgatgatgatgatgatgatgatgatgatgatgatgatgatgatgatgatgatgatgatgatgatgatgatgatgatgatgatgatgatgatgatgatgatgatgatgatgatgatgatgatgatgatgatgatgatgatgatgatgatgatgatgatggtgatgatgatgatggtgatgatgatgatgatgatgatgatgatgatgatgatgatgatgatgatgatgatgatgatgatgatgatgatgatgatgatgatgatgatgatgatggtgatgatggtgatgatggtgatgatgatgatggtgatgatgatggtgatgatggtgatgatggtgatgatgatggtggtgatggtgatgatgatgatggtgatgatggtgatgatggtgatgatgatgatgatggtgattctgatgatggtgatgatggtgatgatgatgatggcaatggtgatgatgatgatgatggtgatgatgatggcgatgatggtgatgatgatggtgatgatggtgatgatgatggtgatgatgatgatggtgatggtggtgatgatggtggtgatggtgatgatgatgatgacgtagtcaggggtggggtacagtggtagcagtggagaaggaaaaccactgcatgtcacttgcattgtcctttatctcacaagtaaaaagattcatttgatcctcataatagtttgtgagtgggcagatgcttaaatcactcccaatctacaaataaaagaaccgagggacataaagtcaggaatttgctcatggtcacataattagggatcaattttatagtaaatcctgtcttctgattcccattttactgttatttcacctgactacagtgccctatacatcacagaagtcaggaaaaacatttgttgaataaattagtgtgatttcattggcctcttatccttccatttttttcctactgacccagtgaattaggtgaaaaaagagaaaaaacagtatatattgatggtcctgattttgcaaggtaatcataatttcacacattgtgaagtgtgtcttgcagtacattcgcatatcctcagtagctcacaggaccaacttgttctgtttagagactaggatgacttgtttatgaataatgcacagggcaaagaaaaaagaaaagatttataagaaaactccagaaagatttccatgacatgctgataggctctgctcaggtcctggatttgtggtgatcgtagaccagggtagcttgaagaacaggtagtagtggtcgatgagcataggcacctcagctaggtgagggtgcctgaggggccactctgagtgaaaacatttccaccaagtcctcaatatgaagaaaaactgtggagaaaatccccctacttctgcagagcacatgacctctgagggatattgcttatgatataaatgcattgatgtggcaaaatgaattttaaaatattttgtctgagtccacatttcatgaggtgtcgctgattaaaatgtggctgactgaaacgatgcttctccacttagattttgcttgaatggagttcttgtttggcttggtaagccatggactttaaatgctttcaggccagcttgtttaaccgcagaaagacttcctggagtgacctgggatgtttcactttgtaggagtttcaggtgaagatagtctatagccaccgagtgaggaagtcttgagccagctaggtcatcgcaaccgagaaaatcaaaaccattcttcttttcttcacagtggacttaggcccaatgtaaagaacatctggaaacaaaaattatttcattaacctcaggagtgactctgtagttagatgttcaagtggtattgctgctaataaagtaatctagcctctagatcatgataatgttttctcccctcccacaggcctgtgcacaggacctgagaacaacaaaaaatataataccagtattctgagatacagaaactgcaacaaaagtgatcaaaatgatttatcctagatcaatggcaaaaagaaaaataacagaaatgctgggaacatcaccatttccttctgatcgactttcaggaatctgatccaaataaaacaaacaggagtttctacatttacagacaattcattaaaacagtgctgaagtaagaaattctgcatagtattaaaatcaggtgattctttaaccttggaagtcatacattttttaagcctattttctcacctgtcaaataaaaataattcctgtttggcaggttttctataaggaagagatttaatatttctaaaacttgtagctagtgcctggcacatggtaatctgctaataaattacattgactgttattgcactgttttgaaattataaatgatactcagtacagtaaaaaaaaaaacaaaaaacagaacaaaatgaacaaataaagatattccccatgtgcctaataattctctgagattttaggcctttgaaagctgcagtaactgctttagattactggtggtctgaagctgctactaggacctgacctatacccaggggagggtgcagaatctcggagagcctgaattaagaagcagtgcctgtatttggagatgcaatgaaatcccaggtgttcctctcagaaactgatggctgaagagaacctggaagccccctgatcaatctcagaaaccatgtgtagggatcagcccgcctgccacccgtgtggggccaggatgcactttggcatgagagtgtgggttgggagatgttaccctggaagattcttctaaaaagagcaatcagtctagaggagatttggtagaatcttttcaacatatcacacctatccctttttgttgttgattcaattttataatggtagattcactctaaatctagcagaggagtctttctgccaattcagtaaaaagaaaaaaaaaagcatccagagatgcagtttaattgatcttttccaccagcatcctgggaattcctcgatgtatgaattgagttcagttgagttgtccctgagttggtttttcacagacccaactgcatagggaacaacagcttttttcccagaaaggattatagctgtaacaccataactgttatgggttgaattgtgtcccctcaaaagatactttgaagtcctaaccccaggacttgtgaatgcgactttatttggaaatagggtcattgcagatgtaacaaggcaagatggggtcatagggattaaggtgggccctcattcaatgactcctgtccttataagaaaagagaaatctgtacacagacacacacagggaagatgtgtgtgcagatggaggcagagattggggttacactgccacaagccaggtcaggaaacaccaagattgctggcagcagccaggagtagcgagaggcaaggaaagatcctccctggagccttcagagagaggatggggctgcccacacctcatctgctgacttctggcctccagtactgtgagaaaaatgtctgttgtttgaagccacccggtttggggtactttgctacgacacctccagggagcaaatgcagtaaccatggccattttgatacaaaaaaatgaggaccctgagagttaagtaggctgcccaagatgacctaacttgtaagaggtattcctaccctaagatacggtatcagctgctatctttaaggtgacttcccttagtagcttcacgaatttctgagatccaatcagcgggcttctctgcttggcctttttatcgaaccgcagacaaaccagcctgacttgttgatttaaaatgttctatttcatgcatgcacggccttgaaaaagaccacagaaaaattacacatgatgcccaatttattctgttcttctttcctctgactgtgatgtgtgactaataacactttttttcctgtctcgtggaaattgagaagtttcataaaacaagtctccatcttctcactgaattttttttaatattcatcaaagcttcctccacagaacatatcaggaaaactcaaatctttctctgacttttcataaagtcagtttactattgctatttttaataaccattttctttcagaaaatgtgtcaatttactaaagaatatacaaataaacaaaagaaaatttatacataactcaatccctcgttattaaacattgttattgttgagtgtacctcctgtctttttcctatgactatatatccaaaattttacttacaaaaatggaatggtgccaccatacatttttatgggcttattgttgttgctgtttatttaaaatataatgtgaacattgtaaaccaaaaagcatctgagacaggtctcaatcaatttagaagcttattttgccaaggttaaggacatgcctgagagacatgcctttctccaaagatgattttgaggacttcggtacataaaggggaaaaggaggccggaggggaaagaaggaaggtatggtcacatcactgaatccacttgttgcaagaggaaaggagcgggcaggggaagagtcagtacgtattcctctgacactccgtaaaacggcactttacataagataaggcaaacacagagtagctacctgtggagatatcaaaccttctatctgtagcttctgcttaggaacaaaaaggaaaggcagcttcctgcatgactcagctttcagcttaattttttcctttggcatcgtgaattggggtctcgagtttttattttccttttctttctttaatgccataattggaaaattctagcttaaaatgtaaaatctttatactcccggcgttctcagaactctcagaatgctgagcgcactctgaaactctaggcaaggggcatggtttgcaggatctcccaaccttgttttgcctgtggtgcccctgtagaatagcctgtcctggaacaccctgtggaaaatatcattctacataatgacttttcaacactgagcatctcccatggcgtggctgtgccacaatctacttagttcctgttcatagaagtcaagttattatcattcatatacttcttgcatattttgtaaagttcccatcgtatgtcttttctaatatcccagaaacaatgtctctgccaggcacatggcagttgtgtcaaccttgtcatatgcatgtctgtgaaaactcaccgaatacaaaaaatactgaaaacagaagcgggcactcacttcagaagcgctgctgtgccatctctcctgatgtgctgggcagcgtttcctcctctttgggggtctcaggatcttttggttaccaacaaggaatacagagctccaggcctgttggaacggcatgtggcccgggcctccatttcctccacttttcctggtaatgctgatgcacacccaactggggaaacactagataaaggatgactgtcaaaccctaaatagtaatgtcattcagaagagctgaatactgcaggtgaagaattttaagaatattgtagccaactaatttcacttctttcttttttctatacacagagtgatagaggatgaaatttaatctcaatacatttgaaacatctcttccaacaaataataataagactcaaaaaataacatcgtgttacaatttcattggcagcagtttttttcctttttggtggaacataaaatagtggtatgtcttataatttatgggtccttcattttgttgatatctcctcgggcaactaatatgaataccttgcacagaagaaggtgttcgagacatgtttcgtaataatgacgactaataaaagcgaccaaaacatcaaaccatgtgaatgactccattaaaatgtatttcccaggtaaatgggtcctagagctcctattctaaaatgcaagaatgatcacatctgtgttctttttatgactctatggtggggctgagtgtggtggtgcacgcttgtaatcccaacactttgggaggctgaggcgggcagatcacctgaggtcaggagttcgagaccagcctggtcaacatggcgaaaccccgtctctactaaaaatacaaaaattagctgggtgtggtggcgggcacctgtaatcccagctactcgggaggctgaggcaggagaatcccttgaacccaggaggtggaggtggcagtgagctgagatggagccactgcactgcagcctaggagacagagcgagactccatctcaaaaaaagaaacaaacataaaaacaactcaatggtggcttgttatttccaggaagataaggcccaaagttcttaccacgaaaaacaaggtgtttgacaaacagtgacccttccaccctgtccacctcgcctctgcttcctgccacaacacaggcttctgtgccactccacctctcagtcacagctgccacttcctccacctggaagtcctgtccctggcttcccaggcaggcgaactcctcttcagccacttagctcgcgtgtggccccttggtgaggcgcgggacggttcatttgttccctctgctccccttgccccccgggcgtgggcaaatcacactggaacatcactatttgttccctcacgttcacccacccagaaggtgggcagtgctttagtaatctgacccttgatgcggatcttcttgggttagttcaggttgaagaaatgtttgtcggattgaatcaagggatggccttaaggggcagatagaattcattcacctgggacccatgtggcccagtcatccgttcatttgttcattcggcatttctgtatcctccacagcccaggtacgatactgagccctggaagcagggtcaaaacaaaacagaaatgatctctgccgtcctgcagtttataatctcgcgggacagacagagattaagtaaataaaagcacaagtaaatgtgcagcgtgtgaagtcccgggactgccaggactctgctacagaactcttaaagaacacggtgcctcttttcttaaagggccctgtgtgtcggctgagacgctgtctgcaaggcctccgtaggccttccccgcaggcaaggtgtccgcgcacgctgctccctagcctctgtccctgtccctctgtggtctcagctccctactccttccccaactgcaggacttgggcacaccatgcccctcctctgaaggccagccctgccctggcagccccttggcatctggtcgataaagtccccactagattctatgaaaaggttaaatgagggaaagaactagggctgccgagagaataggaaactggtgccaatttaaattaaaggggaggggaggacatcagccgggaaggaaagcaggaggcagaagcgaaaaggcctcctgctggctgttcacacagcgccgcgctgtccaggtgaggttgcagggagcctgcgataagttcccactgatgacactagtgcctgtttctcctttgctgaagcccacggccctcaccgtctggaccattcttttgatgaacacatgcatttgtgttgctttttgacgctctggtccacgtccagctgatgtttcccacggtattggaaggtcccggaggtccgtgcccacccagtgccgcaccataaatcaaagatacaaaattcaagataatacctaatacccttttatgctaattaatggatttaattgccacaaccgccctcagaattagataatattatcatcctttcttatgaggaaacagaagcacaaagaggttaggcaatttgcatatcacacagctaacaaattgcagaatatttgaatccacaccatttatttatttgttccacagtgaatgaacaagtatactttgagatattgatatgaaaccagtataaggagagatggcaatgctttgagtctgtgctgaggagttaagcacagtggctggataggcaaggacacccccaggcaggaatgaaggaagggtgcttccgcaacccaccgagtcagcctgggtgatccctgcactgacaggtgaccagccaggaataaaggctcactgacaatgtccagaaatgagatagtactttctttgtacccaggctgacatgagctggcagaggcagcttgttgtctatccactccctattatcaatttgtttctcagtagtagaacactggtttacctgggaccaaaaggcgtccggctgaaaagaccacgtttttgagacttacttatcactcaggatgcaatgagatatcagcagaagtgctgggtgggaggtggggaaaagctccttcaaagaggccaactcaagcggaaaatgtgccccttggctctccctctcctcttcttgcctggaacatggacctgatggctggagcacaagtagccattctggaccacgaggattcttgaggatagaaaccagtttcaaaagatgacagaacagagggtaggagctagagtcctaataatcatgaggccaattttctactagcctagaactccttatttctcaatccttcaagtgagagaaaaatatagctctgtctcttgtaagccctgttatttgagctttctctcctatgcagccaatcctgatcctgtgataagactttctcatgtgttaccaaaaattgaaacacaacttgagtttgcttccaattgttggaagcaaaccatgtctttaatgaaggaaagatataggaaagagtccacatgccaagagaataatgggtccttcaagatgcaggtcaggtatcagctctcagataaattttttaaaatctacctttatgcctataggaaagttggttgtggaatgatttgtcatgctactttaaacctcacaaggaatgtttcttttcttttttttttttgagacagagtctcgctctgtcacccaggctggagtgcagtggcacgatctcggctcactgcaacctccgcctcctgggttcatgccattctcctgcctcagcctcccaagtagctgggactacaggcgcccaccaccaggcccagctaattttttgtatttttagtagagatagggtttcaccgtgttagccaggatggtctcgatctcctgacctctcacaaggaatgtttcaaatagtcttcctttgatgcaggaaatgtccagaagaatgttctcagttcaaggcaatgatctggcaattaggatgccagagtctgacttttaaaaatataggctgctgggcacggtggctcatgcctgtaatcccagcactttgggagggcaaggcaggtggatcacaaggtcaggagatggagaccatcctggctaacatggtgaaactccgtttctactaaaaatacaaaaaattagcctggtgtggtggcggacacctgtaatcccagctactcgggaggctgaggcaggagaatcgcttgaacccaggaggcggagattgcagtgagccaagattgtgccattgcactccagcctggacgacagagcgagactccatctcaaaaacaaacaaacaaacaaacacataggcactgaattctgacctgggtaggcttagtaaaataattaccattctgggttatagctcccatccaatattctgcaagcacgcatagtttatttttcctacctgcacgtgctgtcactgtcaggcctttaactgaacatctactatttccagtgcggattggggatttttatttttcaacagtattttccacttgttgttggaccgttggatcctaaaacgtgtacctgattgtattaatacatcacttgggcccatcttattatcttgaccaatgaatcttactgaacatgtatttcagaagcacttctagaagacacaaggtgaccctctaattttcacttcttttgagatttgcacatttggcagctgagggctttagcatgatcttcttcagagtttacggaagctgcccagtttcacccagcaccttctaatttgtttcagtggctcaggtgaaaccagaagcatttgttttaaaatccttcttgccaggttttgtttgctgagcctggtgcgtttcgttactaattcaacaatgccgtgacggcagagcccagtgctttttctgcactgggtagggtggcacgttgcccggaagtacctgggggccactgctgccacaggacacaatgctaagtgggaaaggtcatgggagctacactctattaatgtggtcagagtgcctctccaagaacaaagtgtggcccctcacaggagcatgaaagcagccagccctctctttccaggtcgctttttaagcttatcattatgaagtataaacagtcaaattccttgggagcaagtgcagccttttctgtattgcttgcagaatctctccccactgcaggtttaataaaagccaggagtacttttctctagctacagcaagatgtatttatatgtttgggactggttaacagggctgtgggagggggttaattgtgggtggttttttttttcttttgttattattggataacaccattattttttccccacctggtactgacacatattaacacacattttacgataaagtagttcctgtaagctgctgcaatcatagtcatttgcaaacccaaagcttgataaacctgaaatatttaaaacaatgttgttattattagccagtaaagaccgggctctccagacttaggactagctgaaacttcttcctgtacctcttgccacattttccttattcctcttaacctagagagtatacagaatttctagggggttctaggaacaactaatgggctacacacagtgtttttgtgttaataggtttggctttctctccagtttgttgaacggttttttattgctgatgtttacgttcttatcatttgctctctggcaaggttttgttcttctataatcattttctcattttaaattcatttgataagtgaatttccaaaaaccctcaactctgctgggtttgttttggttttgggcacctctgatttataaaagtcattctggatactgatcagggtcatacttcttcaggggatatgaacgcatttgattagtagcctgtgggtcagtctgctttccagcatatatttcttggggttggaatcatagaaataaatccaatttgtttgactgagatacttcaatcctcctcctaagtcagttgtcacatttcccatcaatgtcctattttgacattgttcacgtcattgtgagagtaactaaatatgcaaggttttggaataacctttgggatattctattttatttgttttaggaattagaaaattcaatctaagctttacaaaagtctttgctacctcataaaccatgcttcaattccagtctctaagttaagtcatatgacgtgtttctttgttgtgccagggaccagatcctttggtgggtcccagctgtggagtctgcagcagaagatgtgactagagaagaacctattgcttcaagcagtgatgattttgttgaattaaggaaacagactaataaggatttcaaaatacgaaccagaggataaatggtttaagatcagaatacagggaagcagtaaatgtagggaaatagcaaacttgtttcaagaaagtgcaaaatgtttccaatactctctaccagagtagcctcctcagagtaacagtaatggtagtaatcactttagttactccataacttattaacttctttagtttcaactctgataaatagttatgtcttcatcaactaatcttaaccttaactctgtgtctattctaaacactatttttattctcattttatttcattttttaaaactttgtatcttgaaaacaaatcaaacttatagaaaagtgcaaagaatagtaaaataaactgaaaatattctcatttaagattcatcaggtgttagcattttgcacatttgtgtttgccttccatagatgatacacagatgatagataggtagattgattgatgtgtaggtgtgcatacggtataacttaaaatagaagctagatagatagatagctctctctctctctccatatatatgtgtgtgcgtatactattagagcatatatatgtgtgtgtatatgtattctttgatgataatatatttgtttgaaaatccttctaaacaaatatttgtcttagaaaatcatattatggtgtggtattctacgctttcatactgaacataatttctgaatggagattttcacacacattctgtattttcatttcataataaaaaccaaaacaactagcagtgtgaattatagggttccctttatatgttagtggatatcttaataacctttaataatataacaaatttaattataatgtttaaatatatataaaaaatacctttatgaccacgttgtttaaaattccacactaagacaacaatctcaatagagaaaacaggcaaaagctatgaacagaaaatttacagaagagggaaccctgaaaaccatcaacaatgaaaagatgttcaatttgtcagtaattagagaaacacacattcaaacaataatgggccattactctgcacctattatattagcaaaattttaaaactagataatgccaagtgtccttgtcatagctgattggaccaaggcacagggcagcccatgtataaagctgctggccacataggtggtatctcacttgactcagaaagatgggctggaaaaatcagatttgtctcttggaaatctgtatctagcacattttaaaacaaacacgtttggaaggagaataaacgtcagggacctgggctagggcagggcctgaggtcagagcaatgccaatgggcctcagtgcaccaagttacaagggaggggcttcgagcaggcgaaggagccaagagccttggaagaacagactggcagcagagtgatgtgtgaaggccagtagagatgccgggagacgtgccacggggcaaagaggggaaagggattcatctcagttcctgccagcttcccagttccggttcagtgcaaactgggggacttccagttctctttggaggagcaggaattggaggtataggggaggaggagatacaagaagaaggatgaaggcctttgaaattccaaaggaaaatgacttcagatatttgtttgtttgtttgtttgtttgttttgctactaaaaacagagacagagtctccctctgttgccaagctggaatgcagtcatgtgatcacagctcactgcagcctcgacctcccaggctcaaacattcctccttcctcagcctcccgagtagctgggaccacaggcgtgcaccaccatgcctggctaattgtttgtttgtttgattttttttttttttgtagagatgcagtctgttgcctagactggtctcaaatcctgggctcaagtgatccacctgcctcagcctcccaaagtgctgggaataaaggtgtgagccacggccagagattcttatgccttgccaaccaatcaatcaagtgtgagggtataaagacattttcagagatacaatgaaaagaaaagccaccctaaaacatcaagtgcacctagagttttcttgatatccttttgtaacatgccagcattttgtcaaaatcactgaagttcttctgaagtgatgagtcaacaaatgtgtgatgttgaaaagtaaattaaaacacagatttcacaccagccagtcatcagtccctattcatacagtgtcgtaggtcctcatttagaggcattgagaaattagaatattccaagcatggagggcaaagaagacatggaccagattggcttccagagagttgatagaacagtctgggagtcagacataaaaggagaactgctaagaagtcccagggcgtgacaaggcctgtaatagcagaggtggaccccggtacaggggagtcgcagaagaggtcgctcagaccccacctgggagagtcatgagtgaggtggtccatttgggccaggtgttggaagataaaagaggaggcagattgggatggaggttaaaggtgctggggcgaggagcagtcagattgagaaggtttttaatagtagcagcatctgcagggcaaggaaatggtgtgtaatgcaggattctgaaacgtgggcagtgaatagtagaatgggaggctgagggcgaaggcaggggcacgctcagcaacagcaaatgcaaaataacttcagggaagggaacttcagtgagaaaaggtaggctggctggaggcgatctgaagcggtgaggactctcccaagcaggaaagcgccacccacttgtcctccatggatacgctgaccctgggtggctcagacctacctaatgtgaatccggttggggaggaaggggagcgggcatccccaaatctacatccacaggattcctatgcagtcaaaatttgggaattaatactgaaggcaggagtgttaacatgggtagggaaacgcaatactgacggaatcctaaatcaatgactacttagcaaatagaacatctatatttacaagtccaaagtgttaacataactatttgaaacagattgctagaaacaaaaataaatgggacagtgccttggaaatatatcagatagaatatgactggtgatagagtcctgaaaaagaagaaaagcctgggggttctgcagaagatttacgttgttcatggcattaatcatggtagattcccagaggaggtgaaatgttatggacgggtggaatgtgatccattttactgaggaagtaaaactattcttgccttgaaggtaatgtttaaagtcaaagaatttttaattaggtgcggattttttaaaaagaatttttaatttacaaataagattgagttaaagaatcattttctgccgtagaagcaataggattttttaaaaattctattttaaattgcataaaaagcatcttaaagtaatcagataagttgagccataagtaaatggatatttaaagatcttattaaaatagtctacctgatttagttattattctgaccctatatagcaattcacagggttttgtttcaattaagtggctctaagattatcatttaaaaacaaaaagtgtaactctcccgtttgcagctctctgcactcattctatgactggaaggtggggcttgttttgacaatgcttccagttagggtctcttaagtgatttgcatgttattaacctggatagccactaatagggcttcacttcctcgatttcatacatagccccggctcatataaaaaagagttcttcaggagagcagaaaaatcggagcacttgcactatcggtgaaatgtgtagaaagataacagaagctaccctcctcaaaaaaatgatgagtttgatgaaaagaaattaacaagctgtgtgagtgtgctgcacatgatcagccatgcttgctaagtctgtctgttggttgttgctatggctacgaaaagccagtggaacccaatgagctgtctgcagcagagctgagaggaccagccattttacttatggaaaacagtgtggcatattctgctgagcttcgccctggaagaagcctcttttatacatctcttcagggaagagagaagcaatgggcatgttagtatacaatgatcacagccacgcaggcctgcaagctgccttttggacaggctgttgactgccgttccaattagctgattggagaatgtggaatgcagagtgataatgctgcatatctgctatcaggcagcagcaaaggtttttgtcttgggaaggcaagctttccctgcaatattatctcagcagctccctagctgcttaccctgaaaacgagggatccaaacggagggtgttgcactctgctaacgctggtcctgtgcgtggctgtggcatatgagcggcaggtctgaaaaagcaggtgtgtgctgggacgggcactggactggaacgcaggcggacgctctcgggtttacctgcttcctgttaacagattgtgggctcccagggcatatgtctgcacgctgaggccgaggcggagaaggggcttcctgagcgtcccagtacactgacagaggtaagcttttttgacctttttgaaagcacagcataaaaataactggggcaaaacttagcctgaaagatttacgttgattgtgtgatttggatttaccaaacaaacatacacagacacatacacacacgcatacacacacatttctagaaaatagtatcagagacatagagttgtttcagtgaattttggttctagcaattggaagataaaaaacatgaccgatatgctttggggttttaaaaccaatatttactgtttgagcagactacgatggcttgttctgaaccgtcctcacagccaacaacatttctcgcttgtgaacaatggattctttcgtgacctgcactttgacttgtattcagagaactacatgaaaaagaactacatgagaagcatttctttttaagcctcgtaaatgatttatttaactcttaacacagctatgtacacacttaaattgaagaattctgttctctatgtgggtcataatagccagtggattttgtacttgcttaccctggactgagtgtcttggtgtcctgtttgatttagttggggtagttgtaaagcaaacagtgtaggtattggaagccgttcacacctcctttccgagtatctgcatgccttgctggcccagagcacaagacccccattgtgctcccccggctcagaatccaaggaaagaaaggaagcgaagcctctgcattgagttctaggacagctgaggtatgtggcagtaaaacttcttttcttgcacaatttttctcacaagcagataggtttcagagataaagagtgaaaccaaaaacaccgcacacctcatccaaatctgcgctcatacttgcagcaaatgtttgctgtcagttgcttcataataacagcacagaccccgaattgcaggaggaattgcctggtagtgagtatttccttgatttatagtctcttaggaacaaagctgttactgtggattgaaactggtcagtcaaatcaaaatccctggtaagaaaatgacggagtaaggattagattctggttcagcaacatttcagctttactcaagtcagttctttggttgttttgttaccaaaaatgtcagatcacttataatactattgaaaatatttaataaaaatgtttggtcaaaaactttgaacaaaacccctatctacaaaagatggaatctactgtgaaatttaaaataagtagtaactgagatctacttctaagaagtatatttttatttgctacctttttcctccaaaatctggatgacatgagtctcttcagaattttaagtataattttcactgatagatatgggcaggaaccgcctgtttcagagatgtagcaatgttcataagccctaagataagagaatgctaaagcagtaggagaatagttttccaaacttttgttctaaatgtcaaaatagtcaaaatataaagatagagactaagaatctcagtggagccaaacatgtgcaaacgtttggtgataagtgtacgcctatgcgggttgtaggggataaaatggtgaggtgacggccttgtacttcattatgtttaacattcaaaggaaagctaaatgaacagacttagttctgagtccaattctatgagcaaaaatatcagctaagtaagggattctatatgagctgaatgaaaggtagagaaaatctctctccaatttaatttccttcaaagctttacactgccaaaggatttcttagaattgacacagtgcaaagacctgcagcaagcacctgatttcctattaatttttcttgggggagcttttagaagaatgaggtgtagaaatatccagggcacacccgactgctgtgcctgttgcattgatagtggcaccaagtgagacaagacccttagcccacgggaggaatggcacacactttatacctgtgcaagttctttcctattttagtaaccttttaagatgacatgctatacacagatgaccattttaagttcaattctgtacagcgcatctccatagttaataattcaacaattttgagaaccaggttcagagacataatctctatccttcaagactttgcactttcgcttatggctatttttagacccttattttctgccactttccaactcttctgctggcaatatcaaatattttggaatttccaaaacatactatatcagatttttttttttttttttttttttttttgcaaatgcagtgccccctgaagagtcatttcctttaaatctcccctgcaaggacagctgctttcatacgcccttcaagtccagctagacatcccccctcactgtcccccaccctgcttggctacatctgaatcttacttctgactttctgtctgctgaaccatattgcatttgtccctgttcacagccttccagagctttgctggcctctgattctaaagtactttgtccagtgtccagaattttgcattcagacattgtactggtaacctcagacttcaatattttcctattagttactgtaaatatagacttgacctagaaatagaagtcctaatactgccttttatcaaggaaacttaaaacatttgaaaaacaacaatgaggctttcatttttctgatttgaaaatatggcttcaggatcccaatttcataaaagctacaactgtcctataataaatccaaatttcccgagggaaaattttacaatgtatgttttaaacaaaacaacttgaatgttttagtatataaataatactatttttctatccatggctattataaaatgtatagaaaatatccctattacaaatttgttatggaatcagactgtttaaaactaatgttgagttgatgatgattagtagccgattataatgtaagacacttatgaagttgtttttcttgctgaaaccagaagaaagtaaaggtcgtgaactggaaagagattaaataattgaaatgaagtctacaatggcagcatttcttttaatgttcctaagtaaacctaaaaggtgactggaaatcactagttacgttacactagttatgttaccctacaacttgagtacctgggtaagggagagaatattctcttagaatcactcttgatatagatataggtttgtttacagagacttcctaccctctgttctatattagataacattattagtattttttaaataagcctgatttcagtagcctttttatgaaaaaactgccacaatcaaaaataagaatgtacccatagttttattaagaagttataaatacataattccttgtctttaagatatctgtgttgaaagcaaaagttctaattaatactgtatgaatttttgtatataaagtagaattgatgaggaagtttaaaatatcctgatatttgggattagaaagtaaaatatttaggaaattatttaaattcatatttcttgacattattgcattcattccagcattgagttttctaataaaagtaagataaatagcaattcttaattatcatgctgtcctttaaagcttattttggctatcttccagctgattttaatgtacagcatgctataattaaataatagctaaagttggaattggttctattcatcttaaagactaatcatgtttaattattttaaattgcatatagtaattagatttcagaaaccatgattttgtaatatgcctgtactgtttctaacattttctattttaagtcatttataatatttttaaaggtctcagttatgtctaactacatggatagcataatgaaatgagttgcacttgtattttataaagaagacttgtgatatatgattgcattagataattttctggaagttcctcaaactaacaatttaattatggatatgcctgttaaatcctaaactgccactgtcacgtggaaaaatacagataaatatgttttcaaaatatgtttttctgtattatttctgaaaaactcaagacatggacatgcagttaaaaggaaacacttctgcaactgttgagttctgagtattggcaaataagaactcacgtttcagcttaagttcaattaagatgatatttgctgaataaatgacggggaaccagcaaagacgggtttttactttggtgtttgcagcataacagatccatatggaactccaccacacttcactgcaccttggtcttcaaaacggaaatatactagtttaccaagtaggaattttggccaaaaaagcagtggtttcctcttccctatacaggtgaggtagacataaattcagcattaaattctgtaccttagagaagcattatttgagcaaaaattcagaaagctttcactttcctgaatccaatcaagggtcttactttcaaagattttcccacctcaaaaaaacaaaaacacaataaaaaagaaagaaaacaaaaaggcctggtaatgttctcattatattttctaatttctctttatatattcatattataatttagggaaacttatttttaacaaagaacattatctgaaagtttcggtgatattttgtttttttctgttcatttatacggttgcctacttattaaatttttgattttttaaatttaatcagaaattcagtttttctctcttccctctgagatgttttcccagtggttaaagtaaattacaagtcttataatgaattatatcctctgctttgaatgggagagttcatccaatccattgttagaaatagttcttcttttcaggttccttgtcctagtacattttttctggaatagttgaatttgaggacaggggcaacataaacccgtcaggctccaaatcttctgatgttctattcaattcagcatccctcagagactaatatagctgcaaggattagccgcaaggagtccaacaaactatagcaaaaacaggattctaggccgggcgcggtggctcacgcctgtaatcccagcactttgggaggccgaggcgggcggatcacgaggtcaggagatcgagaccatcccggctaaaacggtgaaaccccgtctctactaaaaaatacaaaaaattagccgggcgtagtggcgggcgcctgtagtcccagctactcgggaggctgaggcaggagaatggcgtgaacccgggaggaggagcttgcagtgagccgagatcccgccactgcactccagcctgggcgacagagcgagactccgtctcaaaaaaaaaaaaaaaaaaaaaaaaaaaaaaaaaaaaaaataggattctagccaagagctgtgccactcgtgaagatcctctaagagtacaagcatgggatgccatgaagaatggcaagtgttttaaatgcacagaaagaaaaacatattcaaatgagattttggctatgttggagaaaatttattagtataaatattcattctagtctcctctaaacagaagtccctgtacttacttctcgctgaggacagccagcttctcagaggcactgagtcctctgaagaggtaacaccacagaggcagcagcctggctggtggaaatgtgcttcattaagccttcggctgcatggagaatcctcttccacctattgagaggagtcagcgacttctgcctcactgggtctttttaataccagatatttatacttcatacaggttgcctacactttatgctactaaacaacaaaagtttaagagagcaacgcttggctgcttaaaaatgagcctttttggtagattatcaagatgccttcacacccaattatttcagttctctgtgctaaagttaacgagggaaaggagattagataacaataacctcagctgttgttgtgctataactgtgtcatctggtgaagggtttgagcactttccaaaacgcgtgcatttaacccgtcagacgtattcttgcactatagtaaatactacatattttagtttgctcaatatctcaaaatctaggtttcaaaatttttatagcatagtattactagtagttaagatgaaaattgtataactgcttggttgctctgctacagtgtgaatagaccggtgttgttggatggacctagagcgccaggcttaaaccagtttacgcaaagggaggtcaggagagtggtgaatggcaagagaatggaaaaaggtacaggttacttctgcagaataaaagttacagggaaaacttgactcgctttagaatggcagccggaacagagaggccctcagcaaacaggtcaacatactgcatattcagtcagtatttgctgaatgaatgaacggcttacagcaatcagatcttccccggtgttgtgctaatgccaacacatgattagaaagtgctctttgaatctacagataaagtgacaattcagacatttttctgattttttaaaaatcagaaaacaaaggagaagaaaaaacacatgaaaatttaaaaaggctattattaaacatatatatatatatagtcttcctggtgagaagcattatactttaacaattatataagacagaaatattaccagaagcatagataaagctcaaatgcaacacatcatatggtgaataattcagaagataagaaaaactgatttctaatctcaatttttttaaagcctcttggtacagtcacattcatcaagaaatataatcaacctaaagagttaaaattttcttttgtaaaataaaaaagaataagaaagaaaagtttaaatccagagttataaaattgaagatcttcattttaaggctttagaatatagttgaacagagagttcaagacagaaagaggtatcagtctgggaagaccttttcaagttaaaaaaaaccatagaagctgcaagaccttacacagtcaatcaaaatatctgcttctgatttaactcaagaaaacaatagaaacctattaactagtattcagtcaactacgcaaaagattattcaaaaaatgttcaatttgttcactccaaaagatattgataataataataatttatatagatttcactctgtacttgctaccatcccaagagttttatgcatattaacttttaatgaaaaatctggaaaatcacaaaatctataagtataataccaaatactaaaaagtagggacttttaaggacgtttacattggaatttctcagaaacattttctgcaatcttaaattatttcccaaagagggatttaacattgaatcgctttgtcttagatgcgccgataccactttacatgttgtattatttttatatcatgttaatgaagtgttttgacgtgtccagtctttccatgtgaaagtgacctccacgagagagcagtcttgtttacgtgtttttacccaccatcttgccatgtccactaccaagagtgaacgaaggatggctgagtaactaggccaagtcggttattgtaacaaataaaattcacacccaaggaaagggacctgctgaaagcaaggtaacctgcgtgtggttccatgtgactttcatcaggagaaaactgatctggtctacatatctttaaatgtttgttttgttatgggttttttgtttgtttgtttttggtcagtatgctttttgggtaaaacactaagctaagtatcaaagcaatcctttttaagtcatcgagactttttcaacggaggaaacatgacgcaaccaaaaatgatttggctcatttaaaccacttgtagaatttttcctccgaatttaaccttctgagcaacttaactacatatgagttatgtctgacagttaagaaaataataaaaatatgagaaggcacacttatcttctttgtcagagaaaccatatctgttttgggagaagggctgtcttagggcagtaactcagatgactgataatatatcctgaattctttcacactcactttatttagaaacataactttttatatgatatgtgttctgaaatccgattatatcactcactgacttcctttccaccatagatttaattttacaggactaatataactcatttatataatgattaatatggcttttttaattaaaaaaatcttccttctaaagtgtgccaaggattttgactacattttcaattaatttttagatttattggcagaagagcagaattaccatcacccttatgttgtaaaagtaaatgacaatcaaagccataaataatatagtttagtttgaaaaaccaccttcctgttgacccgaagtcccaaatgtcctgtcagtgctttatattgacggttatctggtaaaatgattggatctatgtattattatgtggcataatattacatcataatgatttcgaaccctaagcttgtgcttcctttgaagatcgaattaggaaaacatacccttaaaacggtgcctcacttttttttggctctggtatttaattttgcaactgtcaggaacaaagagattatgatcagaaaattatgtttcctggggaatgttctgttaatgaattgcctcattcccaggctcctcagtcatggtattgcattctgcctttagcccagcctgtgagaagaggtgctgggtttgcatggtgcagaaaaggcctgagaggaggagagaacaggagcgtaaggataggacccagaaggactctggccctctaagtatttgttaccaatgggatcactgaaccactagagcttttgagttcagtaggaattaggaaaagtgttgccttgaaatttaaatgtttctgcttccaaccaaaagcaaagcattggagaaatctgcatgcactctcgctaacccctcagagagtgaaagagtattttatctggtcaacaaaacagaatggcctcttgttgattgacatggagaaatatcacccgtttaaaggtcagattattaatttgtcagtgcattctcttgggaaataaaatcagaatttcatctggcaagtgtcatgacaggtgacacatgatttttaagactatcaccaaaaaactatatctgcccaatatacagatcagtaccatgagttcctaagtgccaagtggcccacagtatctggagtttcccctcctggtagatgggcttgagcaggcaatgatgagttctctgctctcctcttccagaccttgaagactgttgtcccatttgttagtatgttagtgtaagttagctgattgtattctttctaatttgtttggtattgaaaagatggccttgatagggaacgtggagagcgagaaagacctaagttctgggtacaacttaacaagtggtcagacccaactgtggatgtcgaagttgtaactgtatattaaaaaaatcatacttgcattttcatataatttactcattcatttattatacatccatcaaggaccggaggaaaagatgagagaataagccaggaagccattgaaagagcttacaatttagtgcaggaagacaggaacgctagttactgtaatttaagatagaaggtgatggagtgctataaggcagatataatcaatgcatttatttattccttcaaaagacatgcgcagaagtaacttatacaataaagaaactctttgatcgtcttaagcaatggagttccagaagatgataataaattgctcagagaattgaagtttgttagaggatcgggaaagatggattagagaaaatggtattttaattggggctcgaacaaggtgggattttgacaatagtgtggaaaagcaagctttgtagcatcaagaattgttttataccactcacatgtatttggcaccccctcagtgctttcatgtaaattgttgagtctggctcaacagccctgggaggtatgcactatcatcactgtttcacatgagaaaagaagaaactgaggctcagggaagtgctcattgggttttacctgttacgagtcagtggccaactttgagatgaactttttgaaaagaactttgttcttgacagttgctaaagtgctgagattaaagcacatggaaagattaagaaatgtgtttacaactcaagagcatcacacacagagagagagagagagagagagagatgattcagttaaaaaatgggcaaagggccagcatagatagttttccaaagaagacatacaaatggcaaacagacgtatggaaacgtgctcaacatcactaagcatcatggaaaggcaagtcaaaaccacagtgagacaccacctcacacctgttaggatggctatcaccaaaaagtcaaaagataacgagtgttggtgaggatgtggagaaaagggaacccttgtaagctgttgatgggaatgtaaattggtacagacattgtaaaaaattgtgcagagtttcctcaaaaattacaaccagaactaccatatgatctagcaactccacttctggatatacatacaaaggaaaggaataaatatggaaacaacctaaggacctgtccatggatgaatggataaagaaaatgtggtgtatatacacacaatgggatattattcagccctaaaaaagaagaaaatcctgccatttgcaacagcatacatatgaggacattatggtaagtgaaacaagtcagacagagaaagacaaatactgtacaatctcacttatatgtggagtctaaatgttgaactcatagaaacagagtcgaatggtggttgccaggaattggtggggggaggaaaatgaggtcaaagggcacagactttcagttataggacaaataagttctgaggatctcatgcagcgtggtgactgtagtgaataaaaccacattgcacacttgcagcttgctaggggagtagatccaaatgttcttaccatccacaaaaaagataagaagtgatcactaacttgattgtggtgatcagtgcacagtgcatgcctgtatcaaagcagcccgtggttcaccttaaatgtctgcagctttgtcaattatacctcaatacatctagggagaaaatggagtatgcttttaagggtatggaagcaacaggtacaattaggaaataaaaggatggagggggcccagctaagacagcaggaagaaaagaggagagagggagagaaatgaagaaagagctaagcccatgcacagccctggggaaggcaccagcagcagagaagaaagctgcaagggaagcagggctaccccaggggcaagatcccagggaggacagcaaagagataggcccagggaccgaggacagcccagctcacagaggggagactgtgacctctgggacactggaatgaattgagcaagtgagctccactcctgagagccagaaggacagtcagggaagttcccagcggacgcccaggaacggcactgactcacactctcctccttcatacgctgggtctgaaagtcaaagactcatttaaaattattactataaatctctatgacttagaaagtctgacgcaggtgagatttcttggattcagtctttttcattgaggggaatatgttatagggtgattgctagtggttagaagcatggactttttgtattttttgtgttttgagatggagtcttgctctgtcatccaggctgaagtgcagtggcatgatcttggctcactgcaacctctgcctccccaggttcaagcaattctcctgcctcagcctcctgagcagctaggattacaggcgtgcaccaccatgctcagctaatagtatttttagcagagacgggtttcaccatgttggccaggctggtctcgaactcctggccttaagtgatccgtctgcctcagcctcccaaagtgatgggattataggagtgagccactgcacctagaaacatggactttggactcacacattgtcgggtgggagttctggtttagaaagccgattgcagtgaagtaagccgaggtacgaaaccctctatgccacagttccctcatctaaatgagtgtcgccatagtcccaggcattaaaggcacgtgtgttggatgttgatgagagcactgcatctgacgcaaagaaggtctcacagacgtcagccactactggtgttggttgttcctgggagtttatagaaagactctcttccaaattcctgtgctctagttactcatctctaagtaaactctggagtcttgagaagccaggtacatgtgtagtttaagggatgggcggctgcttctgccactcttcagggagatctaggcaccactacaattcgtgtgaagtgtaagtctcagcgacctcagcgggactctaatgctcgtcctaccatttgcagtgtttgatctgtggtgttaaaagactcaggcttctccttttacatagtatttgttagaaaacttcccactacccggtttgctaccactatagccaatgtcactgggcatctcacgattctctgtagctgttacaacagcatcaataggttctctaaaatgcagacaatggaaaggagttgctaaatttgtcaaactttaagtgaatctcatgcttatttttttggtatgttaggtggctcttcttggtggaaggctcacaacctgtaactgactccagagcttctgcttaccaattccagaaaactaggtttagagtatttcctctgagcattccttcatgtgcttttatgaggctaagtctccttccctatatccaagatggatacttcgggaaggtaacatgttctagttctcaaattgatgtcagtacatttatgttactttcttctctatttttggagcagtgagggaataatgggaatttatacaaataaagcacatgagtatttcaagttcaaaaaagaagacaggcttctgggtggatcaggccagtgggcagatggtgatgctgttaaccaaaatgggaatggagaagacctgttttgctttgcttttgatatcagggcaaaaacgtttagacatgtagaactttatatctttgctggaaacactggtaggcagtgagcagtgctgttctgggtagcagaaagaatggggcaaatcagggcctcacatgtagcctaattcaagatatggactgatggttgcatacagcttaattaagcatatatactagctttcgagacgcttttttctgataagaacatgtttaattaataagactatgatgatgtattttaagtcactctgcaaagaaagatccactttttttaaaaacgaggctttttaaaaagctattaagtgtagttgctaagtacacttaggttaaatgttgaaactgcctccacgagttttttctgcttgtcacacgtgaattttaaaagcaactcataatctttttttctttgtttaaaacggtaatacaggatttgactggcctaaatgtcattatcaggaagaaataatgcaagttaaaaaacccaggatattgggccaattttagtgattttatagagtttgatattgagcaaaagttatttattttatgttgaagttgttagaatcacaagtttattctggaaaaaataaataaggattaagatgatacattatcctaaagagtggtgggaggattgaatggattatgtattctaattgtgtagggtgaggtctggcatgtgggagatgctaaacaaatgtgagcaggcattactatcattcttggtgtatgcatgagttcatgtaaaaggcacacaccgtgcacctctgattctccaggctgcgtatgttcagtggtgactagtcgacttgctactcttggtgactgttcagtctttgggatgagggaggggaaactgataatcccgcagcatcacaagtgccgaggcagaaggaaggcacagagtagagtgtgactgacccttctaggcaacttcagtgtgtgcatggtgaaggcaggggcattagatggagaaagcattgtctgcaggtgaacatggtgtgaaagcacattgcaggctggatggtgcgtctggaatgtaggaacagtagggagaaccgggcgtggggtggtgtgggggcatggaagagctttgcagtcacataaagttggaattcattcccagctctgtagtgctaacttggtcttggggaacaggctcctgggcttttcctgacccctatttccctacttagggggaagagataatagcacttacatctgagtattatcattaggattaaatgagattactgcaaaatgaccggcatagcgcctggcacgtcagaggcagaatgaatggccacccatgcctatttttgtcatcagcatcaggatcatcatcatgttaagtagtttgggttaattctttagggaaagaaaaagagagaaagagagagaaccattggagcttctttacagaggaaaagtaatgatcatatttgtgggtgaaaaatatataactggtaacagtatcaaattaaatgaagggcacaagaaaagattacgaaatgatagtgtcgatgaattcgacaagaggaaaacttgggcatgaactaaggtgacggggccgggagaaatgagcgagggatgtaatcagtcaagccctgctctgtgtcagtcgctctcctaagtgtctggaacgcatctgaaacagtgtctgccaaacagtcttcggcacagacagctctactcgagtgtggtcctgcgttgctagaggcgcatgggatgcatagagtgagggaaatctgggggtacccgtggcttgtggaggagcctctgaggtttctctgaagaagtgcgtgaggtggggcctaagaatatgtccacattcgctctggaagctgcccagccccactgtgaccagggaataatagcgtggccacagagcccaggcatgcccagccctaccgtgaccagggaacagcgtggccacagcgcccaggcatgcccagcctcaccgtgaccagggaacagcgtggccacagagcccaggcatgcccagccccaccgtgaccagggaacagcgtggccacagagcccaggcatgcccagccccaccgtgaccagggaacagcgtggccacagagcccaggcatgcccagccccaccgtgaccagggaacagcgtggccacagagcccaggcatgcccagccccaccgtgaccagggaacagcgtggccacagagcccaggcatgcccagccccaccgtgaccagggaacagcgtggccacagcgcccaggcatgcccagccccaccgtgaccagggaacagcgtggccacagcgcccaggcatgcccagccccaccgtgaccagggaacagcgtggccacagcgcccaggcatgcccagcctcaccgtgaccagggagcagcgtggccacagcgcccaggcatggagcgatggatttcatataaatctgcagggccctgggagccattggtatggctggaatgcaggatgcccgatatggagagatagtgagtaaaatcgagcaagcagaccagagccagatggcagggcaactgtgagacatttcaagcaggaaggtgaaataggatttcctttataagatagtttctctgttgtgagagcaccactgaggtagggtgggaatgaattcaagaatttcacatagggccaggtggggtggctcatgcctgttaatcccaacactttcagaggcagaggcaggaggattacttgagcccagtagtttgagaccaccctgggcaacacagtgagatcccatctctacaagaaaatttaaaaaaaataagggaatttcctgtaggaggacagtacagtaatccaggaagaaaagatgaatggctcagctgagacaggacagtagggctgggggaaaagtgctggcgtggagagattatggagacagaaccaacagttctcagctggcatttgggagtagaagcaggctatggtttaatcaccaggtttctgtcttgggaaaacaagacatggaaaaagtgttttgggggaagaagatagtgaaactggtttgagactttctgagatggagatataggtggaacacttaggtggatatgtggttttaaaaaaaatgtctagaccaatagaaatatattgagcagcaaagagaagccacctatgtaatttttaatgttctatcagccacattttaaaaagtaaaaggaaacagatgacaccaacttttataatatttttaacctagtacagccaaaatatgatttcaacaagtataaaaaatagtaatgatttccttgacattcttttttttcgcatcttgtgtgtattttgcaggataacacatctcagtgcaagcaaggcaggtgcccgggagccacatgtagcccgtggttgccatgtagaccttcagagagaggctgggcaggaggtgtctgctggggatggactaggataaaaaccttctctgaaggtacagatcaaagattgctgaggcagggagggtgcagcagaggtgagcttgtcccagtggcaggagagaggaaggaattgccgaagctgccccgacctctttcttctatttttgagggtgtaggatgtgagattggagtctcagaaactttggaaactttgtttatctctgttgaaatttacccaacaagaatctgctatataaatttgcagggcccagcgcaagatgaaaaggcaattccaaaagtatgatgaataagttatagatgatgacagcagggtatcaaacagaacacctggccgttctaagcacagggtcaggtgcacatgctcagtttgcaagctcatgaagcccgcctatacacactacttgtgtttttaggcatcatctgtgaacactcttgcctactgtgaatcaaacacagtttacttagtgagatgattaatgactttgagttactgtggggtattgctgctgggagccactcttcctggctggaggtgaaagcagcttctccccaggccagaggtctgggtgcaccagtcctgttatatccttcccacattcctcacataggcaggacttcaatcatgctcagacaccatcaccctgaccctcagtcacacacccaggacctcagtcatgcccagaagcatcatgtcaaggggaaccaccgagtccccagcctgctagaaatctggcagctcctcattatcattctacttatagaaattcctctttctccacaccttgtcatggtaaaagcatccaacatggatgctttagattgggcttcctcagaggggtggcgggggagaactggacccaggaaacaccatctgaattccctgagatcagcaggatatctagagagttgaggctgggccatgtatctgcagttcttgtcccaggacaatgcttgaagacaccttatttagatttttatatttgtggctgtgactgcaactcccctgccttaaaaatgtaaatttaatgatcactttcaaactgtccctgtagtacattatttatgaacataggaccttgcctccctgaatagcaccaagcgcccatggctcagacactcatcagtggggccgtgccccacccactgcctggatttcctccctcctcctccttctccatctctccactctctttctgctgccctctctccccaccctaacgtcatttctttacctggttatttttaaaatccaaaaaacaatttgaagtgacatttgttatacttaagaaacaattttatgtcaccaatgtttggtcacttagttttaaaagtcagtaaataacagtatttttttttcttttaaaaaagaaagtaaaacaaatgctttttgacagactttccctttgtatgtgccttgtcaaaggcagggctcctccaattctgcaccaatgtccttccaattttgcaggacaggaaggggcaggccaggcaggagcctgcggggaccaaggcccagtcatggatttagctttcgaggaggtgtggccgctgccatgtgactccatatctttcaaccacaggcttggtctctgtaaaagaaggatgctgtgcatagatcataggaccagtcgttctcttatatgaagtaatttgtgcaaaggatacctcacagggcctggcacataactggctctcagtccataataacttcatcatcaataaaaaaaatccccagagatggaaaggaaatctttggcccagacacgctttgttttgtcaagatctcccagaggtattgaccaaacaaggctcaactgggtcaaaaataaaaaaatacacagaataaaaataaatttccataatagataaataaataaaaatcttcttaatatacaatccatttgactttccgtgatcatgttgttctttaactgttgaagtccaacttaaaactcaaagaaacttcattagagtataacaaacacactcttgtatcttctggtcccaattaattacattgcactaaggcaaactaatcatctggagataaattatgtggagtattcacggcaaaaatgatgacaggatagaatgtgggagctcactgttttctaaagaccttattcccaaagaacagccatcctgccactgcctaggctagtagagactgcagtgccacaatcctgaagcacttgcttgagaatgcatcatatgatcttttcccaacagaatttggatttacctgcttaatggtgtttttcttgggctgatctaaaatgagtcttcacatcacatggtattggagctttgcgatctgcagggttagttaagaaagtaaaataacagtaagtattcttataaataataataatggccaccattcattcaatgcacagtgtgtcaggcagcgtgccaaattctttaaatacctctcattgactattcacacaaacgctctgatgagtacattattctcattttacagaagaggaaacaggcgcagagaagttaaacaacttgcacagggtcacacatgtggggaaagtgggattccagcttgagtcggccacattccaaaccctgcactgtcaacagttttctagactgcccatttgtgggaactacagatcagccaaaagaaaatgttacatttctcattttatcattctctctgtattttttgctcatgggctctatggaaaccgttatttataagtgaacaccaaatttccgtatcctcaagatcagaaatagcacgacaataaaaagagggaggaagaaaaaaaacagtctaggatgtcaacaattttttttctgaagatttattttcttctctttgcttgttcatattttctttccttccttccttccctcctccccttccttccttccttccttccctccctccctctctctctcttctttcttttcttttcttttcttttcgatggagtcgcaccctgtcgcccaggtcggagtgcagtggcatgatctcagctaactgcagcctctgcctcctgggttcaagcaattctcctgcctcaacctcctgaggagctgagattacaggcacctgccaccacacccagctaatttttgtatttttagtagagacggggtttcaccatattggccaggctggtttcaaactcttgacctcaggtgatcctcccatcttggcctcccgagtgctgggattataggcgtaagccaccacgccgtcccatattttctaaatctacttaacgttatgaaaatttcaaaataaggagatgtatctagaatggggccaaaggaaatttaggtagcaccaatcatgtttagacatctaactaggatgccacaagactaagcaatagaaaacaaatttttaaccctctgaatataaacattttgtcaatttccattatcaaaatttgcatcaattttaaattgggacattatttagaagctgtcccattagaaaactgatcatcaccaacttgatcttcaatgccagggggcctgtctgtttactggcagtggtggttttacccctggattaagaatgattagctctactttggaaccaaatacagttcacatggagtttaaaaggaatccagagtcttggggctctgtacatgttgaacaatttccctttgttgactattagcactctgatctaaagaagaaaatggttactctgacggcatgtacttgtgggggaaaaacaatcttatttttttcacatttttaagagtatctagtgtgacaaatatcaagtatgagcactcacttttataataaattccacgttgcagattagtcctaacatgctaggtgaaagagttcacccgaggcacttagagtaagaaaaataaaaaacaagtcaagaggtcatcttcagaacatccactgtttatgataaacactgtacagcctcaccttggctggctttgtacgtccattattccatcattcacttttctccactgtgagctaggttttttctatggggcaggcactgtgctatatgaataaaacagaagtcatggccctcctggaccttccacacccaaggtctatgtataccttatatctgaagctaacttgcccagctcacaaacatgagtctgtacaaacaaaacaagatcatatgaagtgcagaaaagctttttcttaaacatttaatgtattcataaatgtattgcccatattttgttcttatgtaggtggtaaatttatacttaccattgcatggtaataaaatgtgacatgtggcaaaaatgtgctcattctaatttaaacagatgtaggttttaagtattgaaaattagcatactttcccaaattagtacttagagaaactttttaaattgtttatgaaaagtggcattttaataagcctcactacattgccatgctcttaaaagcacattcatatattttattatttttcccccatactcatgattttctactcaatgttcacatttttcagagaacagagagtatggaatattcatagctaagtaccaaaatcagccttcctttccattgacacaatgtggaacaggaatgcaatttctgtggtacagagtcaatgctgagtgacaaaattggatcatttcagaaaatgtgatcagggaatcttgaattgttccctaaataaagccagttgtttagtgataaacatattttagagtatttgtctgtgagatgagagatgctttcttatcagaccaatggactagtttatgaataatgaagttaacattcttagaattgaaataatagtttcttttacatgaatagaccatctatttatatatggctgcacaaataaattgagtaaaatatgagttcatagatttcttggctcttttaatgtgaaaataattccaactgtagagtcgcccagctcctcaggtaccttgtaatgatccctgaagtttagagtccttattcattggaggaagctattagtacacattcaacagataagtggcaaagatacacgtattgtacttgtagagccagggtggttatcatgtgagtgagaattgggaatgttttcgctacaatatgtctttttgagtgtggccactaatcagtatgggttaatagactgatcgaataatacatcattatttttgtgttttacatcttaccccaatgctagctactctcaggacaaagttaacataaccactgaagcagtgagtggagataagtgtagtttaacaattttttttcatagcaaatgtgttgtgcgcagatgactgtcttctcatatcctgaataaatccaacactatgctattaaaaaaaaaaagaaataaaactccagatctcttgcctcctcaaaatctgtgaaattagagacatgtttcaacagcctagaaattagcaaggaccattcatgaactttttaactacagtagatatattgtttctcagtgaaacagataacggcaaatgtagcccatggaggcactgctccagttgatttggaaacagtacaagagtttctaagtatttatataggtaggaagaaacttagggtcaaactcatttccaaatgcactaaaacagtgagaaaatggtcaagaagcaagaatagcagcaaaattacctaacaatacctcacctggcacattttcaaaaacttctaatgcttaaaaggagtttaatgaaatattgcattaaaaatcaagagaattaaaaagttataatgtctctcttgaatgattctgttgtaaaaaaatggtatattctgaggacaccaatgtatccatttaaacataaaaatagaggagactatagaatgaaattatgactttatttgctaaaattatatttaataatttatatttaaacattataagaaattatatttaatttcttgattatatataaatatattccatatttgataagcaattactctattatctaatacacaattatatattaattatacttataaatatgatttatttcataaattatactttgctaaataataaaattgttatgactttattttgaataattattgcatagaatccctgagtacctttgtagctaattcgaatctggataaggtgagtggagatgaatgagtattaggagttctctacaggactgcttaagagtagaaggaaggcagtctcatttctcatggaaaatggaaatatcatattaatctcaaagaaacacaaaaataagctttaacactggatcttaagctgacttttgagtgttaagaaaaagagcaatgcaatgttgaagacttcacaaaaaagagtataaacatcccaaacaaagatgacctgacctggtccttgatctgtaagtcaaacgccccaaagaataattggagtccagagcgcaggtgtgttctgcggcccaggaatcatgtattctccagctcatgttcttaagtttgtaggtcgtggcgtttgttagtacttgaatttccagcacccttgtggttaccgaaaatagaaggtggtacagaagtccaatttggagtctcgaaggtgtgttcaaatgtgtgcaactgtttttaaaataggccaagtggatagatcttaatctgtaacacgaaaacagagttcaagttgcagaatggtggaggctctgcaatttagaacccacgtttggccacagtgatgggcaccgttggtgaagagctttccaattccttcttctcttacccaacgttatatatgcaaatagaagggtggcttgaattgagtctttctctgtctttgcaggtaagattcattacagggtataattataaaattcaccaaataagtataccctaatataatgctataaagtgaactcagctgcaaggttctctttttcagaagtttcaccagcgagccttgtacgaataattcctctctgagattatctcatttctgaagtcatttttctaattatcttaaatggtgctattctcctttgatagttgactgattctgagatcacactgccgtacttgagtgtctggctatgactcaactgaaatgtgcctaatttgaaactttgaagcaccaaattttatttgtttttctttttaggatatagcctattaatttctttcccccgctgaatccattcttactgaaattattgcaaaccccattttctctgtcggtatctcttttctttctctatgaaaacctctttctgttgctccattgatgctaccacctgacacttcaatgagtctacgattgcgaacagcattaacagctcatttagttcatgaggggtttgagtagcaagtctccgacaaagctgctcccaggcagaacaaagcagcagctggcgctggagcagccctggtgctcacggaacagcccggcaggccccgtggaaagccctctcccatctcagatctggatctggaacatgctgcctgcgccatgtgatgtcacctgcccattcgccgcaacaatgtttcttagaccctggcgctggtcatggctttacctgtaaaatcatcttctgctcccaaattttcaaaatgtgtaggggatgattacctaggtttcgtaatgtgctttccagctatgattcaaggttaaatgaaaagtgagaactataacactcgtcctgaaagtctccagactaggccctatttaagaaatgctgtagagaaatgggcggtaggaacaatacgggaaacctgcccgcccacaatctgcgttgctggatttagccataaaacccaagagtacccaaagtggaggcacttaggatagggtggagacagatgggaggagggaggctcagagagaaatgagaagacctgaattttatataaaaacttttgtaaattaaaaaagaaatcagacagagctctcagaaatcataggtcaaagtcattcaatctttctacaaagtaaaaaatagagaggctatatagaaatagccccatttaaggatgctatttataatcccctcgggtcgtataacagtttctctgtcccttacggcttatctttcccttctaaatatgtgtgtgaagaagatgttgtcttttacgtactttttacttaatctgttccccaatgcatcagttcagtttgtccacgccagtctctcttaaccattttcacttaaacaagtcaagcctgctattcattattgctgttgtttgatctttccattcaaagtatccctgtcttgctttatttggtgtatattcactcagtacattctagcgaccagccactgtgctgggaactggttgtattttgtttttaaaggaatcctatcctcaaggagcctgcagtgtagtaggaaaaagaggtaaacagcaacaacagcctactgaacccctcctctgcaaccacttgatggagtagccaatattcatgcaaagtctcatttaatcctctcagaaacctcccagagaggtagatggggttgtctgctatttttttttttttttgagacagagcctcaaaaaaaaaaaaaaaaatggatgaacatccagattggagtgcagtggcatgatctcagctcactgcaaactccacctcccgagttcaagcaaattctcctgcctcagcctcccaagtagctgggattacaggtacacaccaccacacacggctagtttttgtatttttagtagagacagggtgtcaccatgttggccaggctggtcttgaactcctgacctcaagtgatttgctcgccccggcctcccaaaatgctgggattacaggcgtgagccacgatgcccagcctgtctgctatttatagataaggaaatccaggctcagggagattaagtaactctcctaaagtgacatggcttgccatgggagaagccacgccttgagatcagctgtgcctggttccaaaccctcagttctttccttggaatgtaatcactgctgtgatagagggatacttcttcaattaccattcattataaccatagtcaatcaatgttaagttagtgtgtatttgtttgtaacaaggtagataggattataactctgctcctccccctgctagaggaatgatagactctcacagggccttacaaagtccattcttctctatttcttccaggtcatttcttttaacgccactacctttcctctttagccttctctacttactaaatgaagcagtggtaatgctgttgctcgaaggagactgttatgtcaatcataggacaaagtgattagctcagatatggggattttcttaatccagttgtttgacagtcccatgtattcttgtttaaaattaaaatagaaaaaaaaacccaaaacataaaactttgaatgtgagctatctgaaataaatgataaggaaattaaattcaatatctaggtgtgcccaatccatttcattttccccaacagcaaagtaaaagtctctatatttttgaagatcaatttgcaaataatttttttccgtgtaatgtaaacaaaatggtatctaatgattccagtgtgccaggtgtggttttccagcattatattcttcacccctcttcttaatgctttaaggtaatgaacgatattcccattgctcagatgaggaaaatgaggctcaacgattatgcccaaaccagggagctaattcgaggaagtaccagaaacttaactcagaactcttgattctccaagcccatgctcttaagatgatgatggaaacagcctcagccaacacgtggggagggcctcctgtgagttgctgttgtttaagagctttgcatgtgttaactcatttaagcctcacaacaattatgagtcaagggccacacagtgcctatttggtgggtaagagaactgaagcccaagaagattgtagcagccacagaagctggcagtaatagagttgggtttgatggtggcgggtaagtacagaccacgctctccatcattacactctcacacagctcttggcacatgtgactagaaagacaaaatatttacacgagactgtctgttataaaacggaatcgttatgatttatattcatttcttccattcatgatacttaatcagaaaccatgacacaggaacgcttagaacaattttcatgttgcctgtgtatttttaactttgtttaactctgaaaattcaccggccgcctaatcaaacctaccttcccctccattatgactgacagcattcaccattttaagaaaccacagtaagattcttacaggttttttgtttttttttttaaacgctcaaagtcaataccttatggccttgaataaccttttcaaaattgctttttctgtcccgaggacacatttcatcttcaatttagatttaaaaactccctaaactccatcgaagcaaccctgttgaaagctctctgaacaatgatctggcagtgtccaccgagaacagaataaacaatgcgttcctgttttgtgtttcctgttgatcactgctgtgttcttatttctcttgatatcactgatcagtaaattgtagttttagaaaaaagagccaactacttcactatatttagagtcaaaaatattcaaatgatgcagctcccggggcgttaggcatgtcggctcatttttcatggcagattttgctccattaggaaatgataatgggccggagacttaatgccacaactgttgtaagcattcgttgttgatgcccagaagttctttcaaaacttctggaagtattttttaactaatatcttaatggcaggcctaatagtttattgctgtcgttcagccggtctaatgtaaggaaggttgtttttagatgattgttttgtttctgtttctagctttcatggaacagatgacctcaatacagtcatttcaccaggttgggtttgcctcaaataacaagaaatcccacggacaggtagcccagagtaggttcctctctatcctctctccatcgctgtatcatctctctgttagcatgcacccccacagaatgacatctgcatttcagtctacaaaaagaggagcagaacaaggttagaaagaaaaggacagcctggcgcggtggctcacgcttgtaatcccagcactttgggaggccgaggtgggcggatcacgaggtcaggagatcgagaccatcctggccaacatagtgaaatgccgtctctactaaaatacaaaaaattagccgggagtggtggcaggtgcctgtagtcccagctactcgggaggctgaggcaggagaatggtgtgaacccgggaggcagagcttgcagtgagctgagatcccgtcactgcactctagcctgggcgacagatccagactccgtctcaaaaaagaaagaaaaggacaaggaagccctcttctcgggaggttagtgtcgttactgtgcatatgaaattttcaacaggatgccttgcctttagcttattggtcagaaactgcaaggaatccaggcaggtcagttgttaactggccgtactgtcaggattctgtagtgaggaaggctgcaaaatggatcctcaggaggcagaaggaagtgtctaccacacctcttacctacttgacttattttacagagtaatgaatatgggaatagtgacttaattgtaaaataaaacatcagacagaacctcaaactgaaaatgatcctcgaaggaattcttgccaagaaaaagagggcccttgctagaaggtcaaaatgtgagcatttactctgattcagagggcagcttcctgcctctctgcctgaaaccaaaatgtccatcactgcgggcaggatattccctctcatgcctgccactggagaccagtctacttctgcttaccccgagggtctgaacaaagacttcgcattttttttttaaactacaacatggttactgatctcttaacgtgtctctcccatacctttttgtttaatggattgactttgctggttaaagcattcccttccagacttctctataatatactatacataaaatcaagaatatttgcaggcacagaggtaaaccaatgaggttgctaacagccagaggtggccagtccaggaactttagcttcccaaggcctcacttggccacctgagaactgaggagatctatattactgcagcactgtagtcgttgctaacacagaagtagaagtagagagagagtctgcttagaagacagacaacgcagaaaatattcctatgtccagtctctgagggtttgtgtttccagcctcattcatttaggaagtttttctcatgtacttgatataaggaatctatagttccttctacctcttgaatgctggtcaactgtccttcattgggcttaattcgtccttcaccgtcatgagtttcaaggacactttcctagcacggtgtgtattatgtactatccctgctaaattaacttctgtggtcatagtaattatggaattgtgccatggcttgttggattaatttattcagttttttaatgtctcagaaaagatacgtttcatgctgtatcttgatgatttcagagtgttttacacatgtgtaaagaatacattttaaaacattgttgggccatagcaagccttcctgtgcccaagtggtagaagaaaagtttccatagctcctttcaaataaatgcagtgaagaccaagccctctcctatcccaggctttgacccctgctctacagtgtatgacacacaaaactctccttatctctcctgttgacatgacttggctatttgccagaaaataagattgcaaatctccagtcttctcagtcagtgaccattcattgtctgtttataacttatgcataatatggccacaagaaagagtttcataccattggaatgactatggcctgaccaggtggcatggttgatgtgttactttatatctgcctgtctgctcataaaactacattataaataatcacatatggtttcaggtggtataactgccaggcaatatatagacaaatacataattctctcaataaccctaatcagaagaaatgtttatcagggacctcactctaccctagtagagtatcacatggttgtgaaaaaggtctaggaatatgatatatgaatgcaagtaacttgttttattgaaatctattttagaataaatgcaaattaagataacagaacatattatatcctgaagggaaaagcaagtggcacctgcctcttaagacagcttctaaaccaaatatgtagctacaaagcaatgtttcagagaatcgtcttggttggaaacagctgcttaattagaatacataatgttttgctttttacatgatcagatactttttatttcacaagttctgataaatatagaaccaaaaaatgtactcttgtgttgcttaatgccttcggcagaacttatttaatcatttacttattcagcaactacgtattggcccctacttagggccaggcagaatgcagtacctgcgggaggaatgtaagtcatgtgaggggcaagcgggagctgataggctagtggaggagaggggctccgatcaattactccaacaaattcaagcaactgaacctgaatttagaaggaatgaggaaggtgattctttacgagttaaaaaaagggggtggcggggctacgctggtggagcagggaagtccttcctgaggaagagacacgtgaaagctggaggctgcatggcattcgccactgggcagggaaggcattcccatcacattgagccaggcaagccagggccctggatgaggcacagtccaggaatggaagggaggctggagaggccggaggcaatggaagggaggctggagaggccggaggcaatggaagggacgctggagaggccggaggcaatggaagggaggctggaggggccggaggcaagggaagggaggctggaggggccagaggcaatggaagggaggctggagaggctggaggcaatggaagggaggctggagaggcgggaggcaatggaagggaggctagagaggctggaggcaatggcactgggaggaaggtggtggagatctgggcagaaatgctgcagaacaccagatcgtgcagggccttcagtgggccacatggagaaggcttcacaattttcatagcagatttagcgactgttgcatatgctcaatttcaaatggaatagaaataacaagaaaagctaagtcatggttacataaacagcagaggtgctctttaaatacacaaagaattcaggcagccagtttaaaacaaagtttcaggctgggcgccgtggctcatgcctgtaatttcagcactttgggaggctgaggcaggaggatcacctgaggttaggagttcgagaccaacctgaccaacatggtgaaacccgtctctactaaaaatacaaaaattagccaggtgtggtggcgcatgtctgtaatcccagttacttgggaggctgaggcaggagaatcgcttgaacccaggaggtggaggttgcagtgagccgagatcaccccattgcactccagcctgggtgacagagtgaaactccatctcaaaaataaatgaataaataaaaataaataaatgaaacaaagtttcaactagaaaattgagcttctaacagaggttttaagaagttatttctatataatctctttcaatgatactggtcctttaaccttttgttaagattttcacctcacttgataaacctcaacccagatggcaaaatgacacatgtgatgacaaatcgcctactaaaaagtatttacttaacatcaataaccaggcagtagaagtcattggacgtatgatttgactcctttcaaacagtgctgcaaaaaggcgtaaatcatggcagactgccgaatgtaatccagataagcccaagagaaagcataggtttaagagtcagtaaggcagttgcagtcccatgcctctatctgcctttcaggacacaagtgtagggagcttgcatgactggtctaaagtcactcaatgtatgggctttagtttccagcccgatgcatgcattacattgttcagcaggtggcataccatgggtgaggttcctgtagatgacccgacggatgcttgctacgtgcccagagctaccaggtatccttatttttcttgcatatgcttcacttcattgagtgtggttgaagcagacaagcataaaaggtgttactccaggccaggtgcagtggctcacgcctgtaatcccagcactttgggaggctgaggtgcgtggatcacctgaggtcaggagcttgagaccagcctgaccaacatggaaaaaccccatctctactaaaaacacaaaattaaccgggtgtggtgatgcatgcctgtaatcccagctattcgggaggctgaggcaggagaattacttgaacctgggaggtagaggttgcggtgagccgagattgtgctattgcactccagcctgggcaacaagagcaaaactccgtctcaaaaaaaaaaaaaaaaaaaaaaaaatgttactctacttagtctagccttcattttgcttacaatgtgcgtgacttcagcacttccctgttcatccccatcccttcttttagtcagcattagctgatttctataggagaatctgactgctgtttcaatatgtctttgaaactcacgccagtgtttcagatggtcttgctgcctcgccctaagcactaaaatatttgactaagagaatgacacattgttctcctgggatactagacaatgccactagaatgacagggaccagggaggtctctaaacatctatagcacaactcactcttcaaaggactgcaggggtaaagaatgttctctagaaaacaatactcatgggaaaactacatttacttccttcctactgggatcctctcaaataataggaagcgatgaggaatcaattgagaattctgtgctgtcttgggaaaaaaatgtaaaacaacactcagagaaaccctctaaatatatgtgttcaaaaactcacgcccatgaaagtccttggaaatcaccacagtatcttttaaaaattactaaatttagccacatatggaaatctgcacagtttttcaaatatattttgattatttaaccaacattcatataaaatttacaaagcagcagatttttccatggctgtttcaaataacaattttcaccctcacaacaacccaataaaaaaaggtctcattacagaggaggaaaccgaggtatggggaggctaagtaagtgacctacagccacagccacgcgtaagtggcaggatgaggattcgaacccaggcaccctgactccagactctactcttaagtattatgcacttttaaaagttttctgaaaggttcaaccaagaaagtgagaagcaaagctgcagatggtctttgcatatagaattggaagttttaaatgttaccagcgtgagcccagattctctcttacagtgaggattttatttttaccaagctctgtgaaacacacaacgctcaggtgccgcctgaaaatgtgagaagtcattcggcaaactaatgaggttattcagacacactcttaaagttggcgtgctcgtttatttaaggccggaacagaggtggagcgaataacagaaggcctctctactccaaaatatgggtctttctcaccagttctaacaattgtagagttattggggttaacaagatcctcttttgggatgtaaataccctctaatatggtttgatctgtgtcaactatgccttaatgatgtacaaatgatctagatcctggcctttccacatccagtctgatgggactcagtgcttgctttaatctggaatcagctgttcacgtatgcagatgctcgagtcacatccagagtcattaaatctgactctctaggggcggggccggggtactggtgtttgtaaaagtttaccttatattcacccagggatgacagacactacttcatatcatttctctcaagtttcaacatgtttacacgcagcctggggatgttgtgaaaatgcacatgctggctcagtaggtctgggtggggcctgaggttttgcgtttctaacaagatcctaagtgatgacgttaatgttggtccgtggactacttttttaagaagcaaggcccaagaccagcggttttcaaagtgaggtcaagaatcacccgggaatttgttagggatgcagaatttcaggccccgccagacctactgaatcagacgctctggggtggacccagcaatctgtttttacgaagcttctgggtcattgatgctcactaccttttgagaaccgttggcctgcatggcactgcccagtagaaatagaatgcaagtcacataggtaattttaaattagctagcagtcagatttgaaaaagtaaaaaagaaacaagtgaaattaattttagcaaaatatcctatttaacatactatgtccaaaatactgtcatttcaacacataatataaaaattaatgtcataatttacattcttttttcaacgtgtggtcaatataaaaatgatatgatagtttacatgttttaggaagagacaacattaatctatttttatttgtacaaatttgtggggtacaaggagaattttgttacatggatggactgcatagtggtaaagtcacggatttaatgaatgtgtccatcacctgaataatgaacatcgtacccactgagtaatttctcatcattcaccttttttttttgtataaagacctcaaaatctagcatgcattttacacttatatgacatctcagttctgactagccgcattgagctcagtagccacatgtagccaccatatttggagagcaaagctttacacttacagcagagatgatggtactgactttcaccaaatgcttgctgtgtgtcagacattacccaggtaagcattttctgtgcattattcctatgagccctatgacaactcattattatccctgttttatacgagagtgggttatgttgatctttgtttccttaatgccatagcttctcaaggaaagccaatatttaaatgcattatacccttttttggtataaactattataaggaggaaaaagaaaaaaacaattaaaaaatgtgtctgtctgcagctaggcttccaattattaccagtagaattaccattccacattgaggccaagagaaacaaatatcccatgttagattggcaggtatttaagacatagtaaaatgtaaccatttaaaataagtgaaaagaaaaatgctttattctagagtcattttttaaagcctggtatacatttttaaaacaaagttgatcttatttataaaattcagattagagatttcaaagttaatttataattttttaatttgaaatacagttttaatataaggtctattgagccaaaggatttcactgtttttaaatagtacttgaagtagtagtcatgtaacccttttttttcacatggcataatcctcagtattttccataatctatttcagtgtctttctttaatggcaaagaaagaattgaatttgaatttgatataagcatctagcaaccaaccctcacattaattataaaatatatcagggcattttttttttttttttttgagatggagtctcactctgttgcccaggctggagtgcactggtgcgatctcagctcaccgcaacctccacctcccggcttcaagcgattctcctgcctcagcctcccaagtagctgggactacaggcgcgtgccacgacatcctgctaattttttgcattttttttagagatggggtttcaccatgttagccaggatggtctagatctcctgacctcatgatccacctgcctcagcctcccaaagtgctggattacgggcctgagccaccggcagttttttatactgaattcaggttgaagactctcttttcatctcccgatggaaagcctctcagcagtactttctgactacttaagcattctttttgtaatggggagtagggggttgaaaaaaaccagggatttcatctattggaatgaaagcgttcataaacatacttaactgcttccttggtagaaagtaagtaattttcctccctggtggtggtgtaaaggcacaatgactcaatggaagcctgaagttggtctgatgacacacagtatcttccttcatccacaatagaaagagatctcagtcttcagctgccatgatgtgaatagtctcatcatgtgaaaaagtctggaaaatatttaaaaattctgtttttatttattctcactgcatctgtgtgctctaaacccctgaaggcaaggacacttcattctgcccaccactgtattcccagagtgcttggcttatagtaagctctgaagtgctcaccaaataaatatttgctgaatgaatgaatgaatacgacttcttaatttttatttctagaaacaaaatgaaggctcaaagtttgtcagtcattgccagtgacccaaccagaatgatttcttcattggcctgtggaggcagaagcaggggtcactgtttgtctgcctcatgtcactgaatggtccccagtctctgccaatagataagagatgtcaacgcttaacccagtagctttcaaaaatagcatagttgatgaaactggaaatttaggtgcgggctcttttaagaaatcatttgtcttcagtcttaagaatagactgacaacagatactgctaccagagggctctcaactatttcttaagaccccctaggaaatatcagaagaaaagcctccttctcaataaagcataagtaggacatctcgttttcagtgaatcaggtaattcattttgaaaacttgaggagcactgtgtttctttaagattccagtcaactttgggtttgttttgttttcaatggtgctggcagttttcctcaaaatttaaatgaatatttgcacaatgaaccaagtcgttgtgggtttcctggttggtgttttctcccccctggagtggggggtggcgatctgggcaaggcattttcatccctttgcagacaaccccggctgctgttaatgctgaaaatagctcaaatgctctcagaacagtagcaccacccagcagctgggattctttccctctctcatttgcctctctcttgctttttttccttcagacacttggattggacttaatcttaaacctctggagttcaagaccttttaaaaagggctaaataaacaatctctacatgtaaaaggccactgactcctacttcctctgtatagagcaactgttgaactcagctgcctgtaggtaagattttttattctggaattatttaattgttttctggtatgttcataactaatgtctttaaaataacttacttatagtgaaaataataaggggagttgtgaacaattttcaggtaaacacggtgttccagaatacagcaggagcatctgggcatttttgtggctgtaagttttaaactttgcttaaagctctcataatagtgacctgcagtacacgcttgactatgactaagccatggatcagaggtctaattaagcctgattgccagagcaatgagaggatgtttcagacatcatatttttgttgtttagactgctttatttttaactttccaggggcattaaaaaaaaaaaaagaggaaaaagatgcaaccatccacctgagtaaagataatatatataagtaattgttctttaagggcaatgagcgagccgtattgtataatgttctcctttcatcactgtttcgttcattgctcgtgtggaattagagtggttgatttgggggaatctgggggttttgtttttgttattgttgttttgtatgttcctagcacattttaggggacagtgttgaggattccttactaagctgactgtcttttgctgggtacatctgctggcaggtttctctaacgtgacaatgtgatacttcgggtcagtttctgtggctcccctctccccctcgttacgcttgcacttgacattttgcgaagtactttgatctgtggactttaacttcaaacacagcatttactttgattgtggctatttactatgctcagtaaaaagtctccttttttttccttttggtttaatgctttcatagcatttcctttaaacaatttattggagctttagttttcctcactgatctgtcttagatttcacttctagagggacccccaattgtaagaaaagtgttctctggtaaagttctccccaacacagacttcaggacagttcatggcccctgtctggcagatgtgtaagagcaagcagcaaatgagagtgcacagagccccgcgctggctgccctgctgcctcagaatctccgtgtgccttggggcccaactggtgctttttaaaaacatggatgctgaaatctttggagttcagaaatacttttttttcagaaaagtttattggtatcacagagcacatatcaaaggaaagcatgcattttaaccacataaggatcgtctgagtaacaaaaacgggaagaaataacaaagaaaaagaaaattagaatcaaaagaaaactggaaaaaaaaaaaaaaccttagtagccagaagtctgttttacgagtgaaacttctgctgtgtaagggataagggatttcttaaaaatgtatttcctaaaatgggcaaaatgtagcacttactagccattcaatcagctttggaatattctcttcattgtgaagaaagcacaggtgtgtgtgacatttgttcccttcttctttcccaccccaagcacaaggtattttcacagtcctcagccaaatacagagtttgacgttccctggcaaacggtccctgcgtgttctgttgaaggttaggagtagaatgagcctaatcctgtcaggagactgtttaagtcccagtcaaggacgctagctcctcagcgctgacgcagtctgccccgtcctctgcaccttgctaagaaggacaaacgcaagtggccacaggacaaatctccaaaggggcggagctgtggagaaagctacggcagagatctccctggattaggagcagatgcaatcgaatctccagaacttggatttatagtagaaaaacctagagatgttcagtctaatctttaagtttcccaaacctgggcatttcattgccacttttccccttcaaatctacattataagaagcatgtcaatcatcgcatttatgtgtatggttaccattttaaatcctcccgttattttgagcctgggctttgttggggggatggggtgcgtctagctagaatactcactctcccttagtactgggaagccttggtctgcagggctgagtgcaaatatattgctagaggtgatagtccagcggcaaaattaaatggcaccaggatgaaatctttttggagaatggtaggtgatcattccattcccaggcaagccattttccccctgttttgttttgttttttttttctttctgtttctcttcacccctgaattttacgttgaaactttggattgtttgaatgtgaaacttcaggtgaaagctagccaaagccaccgagtttcacccagcttccacatgaaagaagtattctacccagccttgcacgaaacttggcctgtgttgccaaaggtttcatgaatgtcagtgagcctggatttgaaacataacccaaggccaggtgacttctggtgactttgaggctttattgtattagtatagaatctgctgaacagggacagtcctatttccgcatcttctactatagtttcatgagggcacacgttttcccccagtaaactcccatttatctcatgatgtttgaaagccaggttcaatcctaatgtgaatgtttgtagccgtgggatcgaagcactggcagatagaggtctgcgttttaaattccagcagcctggccctcagtggtgtgaacatgttggtataattcagctgaaggaaggaagtcccgggagagccgtggaatgcctttctttgcttaaatatacctctgtgctcgtgaggaacaaacagtaacattttgtccaggtctatccgcttgacagtatgccttttgttccctctccaaaggtggtgtcaaatatattggtggaaaaataataaacttccagatattttttttccgcctgctcaactgatatactccaagggaacattgcaagcattgagaagttcagtactgtggctgggaatgtaaggtatactgagaataaaggagctctcagtgaaggcaatgtccctcagaaaagcatggcgacccagagttgatgtgggtgtgaacggtcagatggtccccggttgggaaggggtgtgtgtgtgttttctgggtcggggtagtagcgagcagagaggaaaagggagatttgtaagctttgttcagcaaatctgtcacatcgaaaacaaaaataatcaagcccaggatctgaaaacattcctttcttttgtagatcatataaatttgtgttggctgaatattgaatttttttgtattatttttctcattagagacaccaagcattaggattccaggcatagtaaataatctccaatgaaaatatgacccattgggaaacataaaatcattgcagataactcccatgagtcagtcccaggaaggtcctcatggttctctggcagttatgaaatgctaagccacccaggacactaagatctgacttgtccttttcttagttgggagatttctaaactcatgtgaagaattttcataaaaatgaatgtgtggcctcactaaagatttaggctatctttggtgagatacatagatatagatttattataaaattaaattgccatcaaatttcattttgaaatttcatagtcacttatatattcaataaaacagactttcattaaagatgtggtttgcattttagcaggtgacatgcagtggatgccctagtagagaaagcactggaaaagctagcaataacacaatttggaagtgccatatgtagaagctgctttttagcactggcttcaccagtcatagtgtagcatttatcagcatatgtgatttgatagccccagactggtacagtgagcagaggaaaggaagatgttcaaatggaggttctagagaaaatcattcagaaccatcccacaaggaagctctcactaaccatatcaaggtataaggagttcagtagttttaagacattcatcatccataacaaaacagaaaaaggggaaggataggcttggcgtggtggctcacgcctataaccccagcacgttgggaggccgaggcaggtggatcacttgagatcaggagttcaagaccagcctgaccaaaatggtgaaaccccatctctactaaaaaaaaaaaaaaaatgcaaaattagccaggcatggtggtgcacacctataatcccagctacttgggaggctgaagtgggagaatagcttgaacctgggaggcggagggtgcagtgagccaagatcccaccattgcactccagcctgggcaacaagagtgaaactctgtctcaaaaaaaaaaaaaaaaaaaaaaggaaacgatgaaaatgccagggaaaggattaaaaaaaaattaaaaattgagaatcaacaccaagctagtgtatgtgcaaatatttctctaaatcattaaaaatcttatttcaagaagacttcatttgtcatttaagaatgcaaaaatcagtgctttaaaaatctttttgtgcttaattgactgtcagagaaaaatggagtccatataatatttatttctcaaggatatattattacagtctaaatttacatatacaatgtacttgttttattttttttttaaatcagtgtttgtctgatcaggacatgatgacacaaaacagtaacagcagtagtctcccctttgcagtagagcaaagaggattatttatcataagcagattaaacagtcatttctagaagtctgcattctccaaccaagtttttattagttatttggatattatgtttttctctgaaataagaagtagtagagcctgagcatctctactctaaaagtccgaaatccaaaatgttccaaaatctgcaacgttttgagcaccaacatgatgccacaattggacaatgaagatgacattaacacggcagaaaatgtgcatacagatgccacagtgacaatgtgatgggctaattgaaggactagagtggagtgcattcctaacagaataagcagtcatgtccatttagaaactcaaagagagacttctaagacaaaaatcgctgttaatgaggcagatgacgctggagaaaacattttaaaagccatcctactcgggaggctgaggcaggagaatcacttgaaactgggaggcggaggttgcagtgagccgagatcgtgccactgcactctagcctgggtgacagggtgagacttcgtctcaaaaaaaaaaaaaaatgccatccggcagaatgcctctcatttctcagaggacccgcttcatgatctgtcaactgcttcagatgtttcttatcacctaaaaaagaaaaaaaatacagtgtacagtgccctttactccaaacacagcatcataggtggcaactgaaagcctgcattgtttgttgctgctgttgtctaacagctgagaaaggaaaacggtctttttcctgtgctgcccagttacctaaacacattatttttcactgtattaataggatgtatctttactgtttaaaaaatagtagtattaggctgggcacagtggctcacgcctacaatcccagcactttcggaggccaaggcgggtggatcacctgaggtcgggagttcgagactagcctgaccaacatggagaaaccccatctctattaaaaatacaaaattagccgggcatggtggtgcatgcctgtaatcccagctactcaggaggctgaggcaggagaattgcttgaacccgggaggcacaggttgccgtgagccgagatggtgtcattgcactccagcctgggcaacaagagcaagactctttcaaaaacaaaaatagtagtattttctactgttaagtactcacgtctgagtaagagcaggaaaatgattgcttattggtagcaaataaattcagtcaggaatgatggtgatgccaaacaacaccagattttccatgtgggtggctgagatattgatgcctttgctttctgacggttcagtgtacacaaacttcattttatgcacaaaattattaaaaacgctgtataaaattaccttcaggctatttggatacactacatataacataagcgaatttcacatttggatctgggtcctgtccccaagatgacgcaggatggatatgcaaatattccaaaatctgaaaaaatctgaaatccaaaatgcatctccagtctcccatgtgcctttgacttacaccttcatgctaagggttgacttttttttttccctggtactacaagatgctcccgcatcattttgtacatttcatgtcctagtcctaaaatcaattatttcttcaaggagctctggttacttttattgaaaaatggtatcagtaatcaagaccagggcatccatttttaatttttgaatgtgaccttattggccacttacttttttcacttgaagaaaattttctttttgtgtatggaatttcactctgtagctgtcaataccttgatctggtgtataaagataacctttcttgctttttcagaagaacaggccacatgtcgcccttgcatactcccctttcccttactttgaaacaaattcaattaaatatgatcaaatttgcatttttttttgtttttttgtttttttttttttgagacagagtctcactctgttgcccaagctggagtgctgtggtgcaatcttggctcactgcaacctccgcctcccaggttcaagtgattctcgtgcctcaccctcctgagtagctgggattacaggcacgtgtcaccacgcaagctaatttttgtgcttttagaagagatggggttttgccatgttgcccaggctgccaggctggtctcatagtccagacctcaagtgatccacccacctcggccttccaagatgctgggattacaggtgtgagccactgcacttggccaaatttgtttttcattgttagtcttggtgagagattcaaagcctttgatatggtcttgaaatgcaatcttaaaagatagaaatcagttgtttcttccttaaatagacgtgagaacattgtgcattatttaaaatgtgatcagtctaggcccttcaatgaacatgggattctgttaccaagccttgtacgtactgtgtgcaaggagccgtgccacaggcagatgaacagtctggtaggagagctgggcacatacacctggatataacactctgcaaaagaagatgggcaatgtgaagtcccccagaactctaggagctcagagctggaattgggagctgggcgtatattgtactagaaaatcagtggtattatcacaaaggaaaagctgtactggaattaggattttggtttggataagagggtattcaaatggcagaaggtgatggacagcaaagattcagaggagagaaaactcaggactcaaagaatatttaggtcccatgcaaagcccctgggaaggtgcattgagtttgtgtttatttattgagaacaaaagtctcaccatcaggctcatgtgttagtaatactgctgagcaatgttcaaggtgattagagaaatgaaacgctggacagaccctgttacacagatgtaactgagaagaggaggacaaagacgagagcacttgaaataagatgagaccaattggtgcagagaccgaggcctcggggcagtcagtactgccctgtgtatctagactttgtcctagaaagtaaaacttacctgtaaaataattgcacctataattttatttaatgctcagtattatcagagatgaaaggttgtgtttttattatttcaccaaatgcatagctctttcattttctttctcttttttttttttttttttttgagacagagtctcactctgtcgcccaggctggagtgcaggggcgcgatctcggctcactgcaagctccgcctcccgggttcacgccattcccctgcctcagcctcccgagtaactggaactacaggcgcccgccaccacgcccggctaattttttgtatttttagtagagacggggtttcaccgtgtgttagccaggctggtctcgatctcctgacctcgtgatccgcccgcctcggcctcccaaagtgctgggattacaggcctgagccaccgcgcccggccagctctttcattttcaataaaacaagaaaaccattggtccaggcagtgaagacgacatttcaaatcctaagttttggctttctgtacttcactgagagaaaaacaagcacgggaggtgaagattacagagaaagacatgaatgtgccaatagtataatgagccaaatgttaggacgaggctggttgaaataacctgtcggcataccgaaaagaatcgagttaggaaattgacacagtttaaaaaaaattttaaagaccagcttgatattagaaaggatagaatagaaacattattctcttgttctcaaataaatttatgcctgaaaaaaaaagagattgaatttagcttaatagaaaaacacacgtacagcatgtatttttaaggcattgcatgttggctactgtgacccctggaatatgctggtccaagtacaaatctgaattggtttaatgctagatcttgacatgccctcaactcagtggtacttctttagttcaattttgcaaacctaaaaaattcgattggtattgaatttagctccaggtggtatccaggagttttgtgtgtgtttgaactgaactttgaaatatttcaaaactatgtaactctcaagttttagaacaaattgttaattttcaaaacactcaagaatgttgaaaagttacagatgggtatattttttgtgaattacaaaaatatgtgaatatacaattaaatgtggttttcaaatataactttgatctgtagatctacagtattttctatttcacatttatcttttttaccataagagtattcacttttaaaacaaaaactgttgaagaccatggttaagaatgggagactatccgaaacccaatatggccatctaaatgtacggtgagatgagaaagcccatccttgtggtcccagcagagccaagtgttggaaggtgtggcctggcacaccagatggttcatttctgtgcacatctatgagtaggcccatagtgaagggactcagccaggaattgttggagataaagatggaggttcagtgcaaattcaagaaggatgtcagatgtcagactaagggatccacgcctcattctgaagtagaaaatggtttttccctctgtttgtaaagggcagtaaaacactcccttttggagaaaacttacagagtgacatctcttagcagcagaaattcgatgttttctttaaaaattgtatttctgacatcaaattaaatcattagaattttctttttatatccactatgactatttttattcaaggcagaataagacaaaaattaagtgtaaacaagtttataaagtttgtattgatataatagaagactggcttatgatggaaaactaaaaaaacaagtaaaaatgaaaagccgagtgaaaaggtaaattcagaggtagacttttatgtggaaaaagtaataaaatactacctttttctgtggtaaaaaaattgatgatgcctacttgtctacattcaaaatatattttattttgtgtttgagcatctttaagaattaacggatgtatttcatatttggaaattaatttagaattggcacacacgtgtttttttgtctcacatggtgagatccacctcttaataaccacagcttgtaaaaacttgtctgaaatcaaagtgataatttttatgcaaaggtgagaaagcttgattgcagtgagatttttatccccttacaattttttatgtattttggatatcaaaattaaaaaacgtttgatgttaaaaatcatttgtgtccacatcataattttttatgttcacatgtataatttttctaatcaatattctaaaatacttaaaaccacaggtgtaaaaacatttggcagaagactatttggtatgtttaaccctcagctgtgcttattaatttaagaattatctaacatataaatcagaaaggaaggaaatgaggaattcactagtaaaaccaaatagtgttttaggtgaccatagataactacttttaatgcctaaagcaatttcattttcattgaataaaatattttcatgagggtcttttcatattgcttcatttatttattgaaggcatttcaccaccatatatgaatcatatgagttttgtggtttaaaactttacattctgactgtagatcagtctgaatcagtgcagaaaaaaaaactgatgaaacccaacacaggctttcaagataaaaactcacaaccagacaaaggaaggaattactttaaccttaaaaagagtattcattaaaaacctacatcatcataatgtaaagaaatatatggactgataaatattacattcagataatggttacctctggaggtaggaaggcacttccaattagagacatgtgcagcaggctttaattgaattagtatcttctattttaagataaatgatgggtacatggacatttgttatattattctcttcatcatttgaacgactcaataaagacctgcattaaaacatctttccctctatttgctatttcttaaatttaagataaattctacataggaagtaaattgtaaatatctttcacagctgctaacattgaggaactatgtaaaacataaatacattacttaaagcagcccaaattttctgaaaatttatcacagatagtataatgtttggcctatacttccatatttttggtctagggctcaaaacttctataaatggtgaattcaaagagaaaatgaatttagttccttagcagacaaacatcttttgtaaacttacattcaagatggtttttgtagtgtgtatctttttgtatggcattgttataaatctgatatttactctttaagttatcaaatagtttgtcattatgttttatgaaaatttataatgggctttgaatctagcagtgtatacattatcttaacctctttaacactggttttgggtcaacaggttgagaagaaaggatttctgttttaagagaatttatgtaataaatgtatgaaaagtgagtaaaacagacaagcagtcctctcagttgctacaggactatggagagcagtgatatggctggatatgcttgagtttcctgttgacacgataccaggcaaaataggactacctgtttttaatataaagacttcattctgtagcttatatatttcgtgtaatttaatttattcagaaaagcttatatacacacagcttttccttaataatatttatacttccttaatgttattggaaaaagctagtgacttttcattaccatttggcaggaaccagtgcttaattttgaggatttttattccaattttttctatttgttttatccatagactcattccaattatgctaaaatgcgaaagctggtagacatcactatctttttaagagttttgacaaaatggataatattgaataatttttctttacaagtaatttcacatgtaatctgaaaattcagtgcaagccaaaagtctttataattttaaatcattaaattcaaagaaaagatggtttctatgtttctaggtgtaaggaaggcaaaattatacctctcctctgttaggatttgttaggggatggggcacgtgggtgttgtgcctgagaattaaattgacataagacagatccacaggagaaaaacatatacatttatttaatataagtttatgtggcatgaaaaccttcagaatttgtgaagacccaaagatgcagtttgtattgaccacttatataaggaattagacaaagagcagtaaattgcagaaatgtgatgaggtggggggtcgggggcttgggccagggcaggtgattggaggagaatggctgggaaggaagggccagtatagcaggtggtacaggtttccctcagcctcagcttctggtccttgcccataggaatcatgcctcccacctggccaagggaggacacctttcacatgggaatgtcatctcctgcttttcagaaacagaaggaaggtcagagtgatcttcttgtacctgctttttgtttttgtttttgtttttgtttttgagagagtctctctctgtcacccaggctggagtgcagtggcgcaatctcggctcactgcaacctccgcctcccgggttcaagtgattctcctgcctcagcctcctgaatagctgggattacaggcacctgccaccacacccagctaatttttgtatttttagtagagatgggatttcaccatgttggccaggctggtctcgaactcctgacctcaggtgatccacccgcttcagcctcccaaagtgctgggattacaggcataagccaccacgcccgacctcacctggtttttcttaagtgcctttaactaaaaatactgaatatgccagagtggtgtattttgggatgccatgttcttaactcgttcataagtaaagttcatgaaagcatataaatatatttaaataataataaacacactgagagaaatgacacaaaaaataattttgaattttctcatgtcattgttactaaagctgagaaaccagatattacataattaacataaagcggtattggaaacaaatgtggagacaagtcttttagattactggcattacatgctgctgactctcgcatcttcatgaaatctgttcccctttgccttctgtgacactggaagcttctgatttaccttcagtctctctgattacatcttctgaattccacttacaggtgcccttttttttttttgcccaaccttaaagttactcccttgggttctgtccctctcgtctaaatctctgtaatcttccctgagttcacctgtttcttccttcacgataatccctaatctctatccctgatctcttgtgaaagttccagactcacatttccaagaagctggtgaacattccctttgaatgtcttctgagtacctcaaattcaatgcgtctaaaactcactttccaactcccaccctgctcttccttcccagggctggatcttgacgatggtgccacccagttactgagaattagaatcttagacaagcattcgaatttttcttcataccaacttagtccctactcattgattctacttacatacacgtcttcaatatcactcctttcctagttcacaggctattgcaacatccttgactaggatttctcagtagtatcctgactacactttacatccattctctctgccttccgtgtaaccccttgcggctgagttatcttgccaaaataaatcagctttgcatgtagacttcccatctaccaaacttctattacatagcaagttgtgcactttgctgtctgttgaggttttgaggatcaggaaagataactgtgtcaaccaatgaaggtaaattcagtgcattgtgtttagacataaatagccctgtgttttcaaagataaaaggcagggctggcaacatttccagattccttagtaaggaaagggtgtggctcactgctgggcatggaactcagattcaatgtcagccctgctactaacctcaaaacacccttttcctcagattctctttcggacacaatgttcacaaatcacttgcttcgttgtcacttactcctaatttccttcctttctgattcacatataagatcattcttcttcaattaataagcacaacaatcatttgttgagagcctactcaagactctgtacttgtccgtgacagtcactgggagcatagcctttctccaatgacatcgccctgaacatccactctaaaaatgcaggtgaatttatgtgatggcctttgtgccttgggaaaaatatcttcagaatgagagctatctatagtagcatatatacattatccatggattatagagatattgttgtatttgcttctatgtaaatatcaaaggagtattattctgatatgatctatggaagttgaatgtgactttggagaaaaacttaagctttcggtacagattttcaagatcaacattcaggaaaaagtctaacagagggatattgaagtaaaatctctgaatgaataaagacattactgatggcagctatgaattcaagtattttaacatatgttcaggtgtttgctttggggcatggaaggagttaaaagtgaaggaaaatgtttaaagttttcttcttcactttgaactacatttcaaagaagtacataattttgacataaaagatatatttccttcatagactaacacaagtatatgtgtgtctgaatgaattaaatcttatgtttggggttgtatctattaacttttattatgtaactgaaatagcaatcatttaaaatgaaatgttttctgctctgctaacatggtgacagattattccgagtaggattggtgacactgctttcttctgctccttgtcctcagtcacattcttgaaattggcaacaaagcagatttgatttaatttttatatcctcatgcaactaatgagaaggaaatgtgtttttaatgcactgcacacttttatcttcctggacgtgttcatgaactcgtatttgtgaaaggcagccgagcttttttgtggtgtatctttgccagggatcagtattgttctatccaatgctgctgcatcccaaagcctgtgtagacgcattatgcagacataggatgcctatacagatgcattttgttaatttttttttttgagacaaagtttcactcttgttgcccaggctggagcgcaatggcgcgatctcagctcactgcaatctccgcctcccaggttcaagtggttctcctgcctcagtctcctgagaagctggtattacaggtgcccaccaccacactcagctaattttttgtatatttagtagagatggggtttcaccatgttgaccaggctggtcttgaacttctgacctcaggtgatccacctgcctcagcctcccaaagtgcagggattacaggcatgaggcactgcatggctgtaatgccagccacattttgttaatttttcagagtattctttcctcatatttggccaacacatggagagtaattaaataatgagtcactgccaattcgatggaaacaaaacatagtacatatggttgttcctgatctgagagttgaacctgagagctgggaagtctaagcatggatggagaacgagaatctgttgtataaagttaaaattgaaatggcatttggagtcccctaagctgggctatccttgagtacacaccatttcaaggagccaacgtggagtctacgatggaaatttgccccataggaatatgaaagtgctgtggcatagagtattttatagaagttaaatgtctaaccttaatggattgctaacgttggcttagattattgctaatgactacaggattttacagaatgtgataagctttgaaataatgactatattagtaacataagaccatgagagcaactaacagaattataactaaggaaccctgttacaggcaatagaataacgattgacttctatctaaaacatcaccatttatctttgaatatttatcactggggatgattcttagagcattcatcaaaaccacagcttaatatcatcaaattattccatttccacattcttttaaaactgtaacagaaaaaaaaaaaaccctttcaattcctagagaactcacccgtttgagagatttcttaggtcttctctattcattcaccatcattcactattatgagatttttgtgaattgttgcacctgcgttctccctacccgttaaatatgcaatatcctttgtcatccagctcaatccttagaaaaaggtacacacccccctcacatacacaaactctgttctgtttcaagatacatccaatggagcaccttaccctcacatgtacaaagagggcaatggaacttgatagcatatggtattgtgagaatcactgaggcaagagcaagcaactccttctggttggtaattggaaaatcctcctcttacattgggcagaaatcatttttaacgcctactccatatctttaagcgagaagctgttatctcctctgcaggctctgtcatactataggatgtgcttcatttctaaacctagcaatcctgacatcctcatcactctggagagagcacagtcattcactcatgcaaatccgagcactgtccaaaggcaaaggactgttctgagcgcttgagacacatcagtgaacaaccttggtaaaaatccctgcccccacagagcttaaattcccatgggcagaacacacagtaaaaggtaaacatgttaggagattatacagtaggtaagagagtaaaaggggctcaaaacatagcagggtaaagaggatctggagaatgtgttgaggacagtgcagcttggagtttcaaatgttgagcaaggaagttgaagggggttgcccatagggttacccatctgggggcagaaggcactgcctctgcaaatgccctaaagtgtgagtggccttccagtatgaggcacagcaaggaggccaggatagctgcaaccaagagaaagaaagggtgagtgccagaggttgaggcttttgcactgaagggagtaggtggtaagaaggggaaggtggaagctggagactaattaggaagctattgcaacggccaggtgaggaaggaaggtgcctggaatgggtggaaatggaggagacggcaagagatggctgggtctccatggtgtttaaagccttgagactgaatgaggcagtgagtgcagaaagaggacaaaaaggctaagaaacttcaaggctaaaaacctccaagattgagaggccaggaggaggaggagaaccctatcaatgaaactgagaaggcatgcccagggagataggaggaaggcaagcgggcacagtgtgctgacagccaagagaagaaactatgtcagagggggaggtgcaatcaagaaagatgatggcttagatataacctgataattttacaatatggacctcaatggggtcctggctagagcaatttggtggaatgctgtaattctggaaagtctttcgcatgatatttaattttaaaaagtcaagtgtaactcaaatgaaataatgctgatttactaggtatgtgaaattatcggttaggacccgagagtttcttcatcaccagcctcattaactgtgtcactagtttcatgccctggtgtcagcaatgctctgaacagcagcctccacacaactctagataaacaaaatatatgcacctgtaatctggtcatcagtctctatgttaacaatccatagcagtttccatttcttacactcaattccatcagtggctcaccagattgtatcagcaattgcttgaaaatattccaaaaatatgagtaaaataggaaagctgccattaggggtctcatttttaaattttacagaacacctaagcctgatcttctccatccagttgtatagatctagctggagagaaagcagatgttttaagaactcgaaattgctgaactaatgtatacccttgtctctgtaatatgttccacaacatggaacaatccataccacctaggcttctctctgctagaccatcatgcctccatgtcttcttatgtcacctggaaggagttgagacagtgatttaatttcccaggacatggaataactcttaaaatggaattgtgatgttggtataaagcaagtggccttaatgataaatgctattttaatatcttgaaattatgttatacaggcattcatttctaacgtttcttgaatatcaaatacaaagttaacaagaaaaaggaacattaacagaaatctctaaaagttagaaatgtacaggtaaagactaaaaattgataggaggtttagttgtgtttcctacccggaaatcaaaatttgaaaagcagtaaaggcatttgccctgctctgcctccttcacataggtgcatttcctgtccatttcagaagctaattatgaaatggccacacaactggatgtttctgtttataaaatagtgttccttggaggggcttgcaacatctaaatatcttatgtcagaataaaagccactgagatccaaagaagtggactaaacttgacaatatctgaaagtcttctgctggaccaggaacccctacagtggacagtgtgcttcctgcttttccacgcagttcgacaggaaaaccatcccaaagtgaacaaaaatggaagcctgcgaagttcatcatgcaagacattgatgccactcacgtctttgtgatagcagaattggttaacgtcctccaggagcgagcgggtgaattaatggaccaaaatgctttttcccttacccagaaatgaaaatactcaatatggaccattcaggaattataagcagcaaatgtgaaagacttgccactcgatatcttaggtgactgattagacgtagagggttgttttagttgttttaggagcatgccacgggaaagaccaaaggatcatttgttcagaaaaaaacctggaactgattttgttataccatagaattaaaaaaaaaaaaaaaaaaagctttaacagttggctgtaatttggcttttattaaccttcattaaaatacaaatgccaaaaaaaaatggaagcccgcttcaggatccatccctggatgttacttatattacatattacctgtaagcatatgtacagatacatttttatagactgaccatatagttaaggtaatgtaaagatccagacaaaattaacaatgaatagtacttgagtttttaggtggcttaaatatttttttcttttgtgaactgactgatatgatttctttctggagaatgagttacctagaaccaagatcctagaacagaagagtgaattttgtgaaatattctccttatcaaattgactgccttcgtgtttggaaaatgtaattaaaaatccatgtgacataaacagcaaaattatagctatactaaggggaaatttttcatgcgatttataaaaatctttaaattttacagagttacgtgttctaatatgagtcatgacttgtaaggacataaaataacagttatgaactgcatagagaagagcttctgttgagcatcttgtattcgattttcttggaacatctttctaatgagctgtcaatgaaaattcagctgatttaatgtcaatgctgccaaccaccagtccagatcacttgcatactatgaaaattcttggatgtcttcacttgttttaaatcaagttacctcaattttatggtttctataaaacaacatttgtaaaaatctgagacctcttttgctttttgttttgcattttaactgatatttacttcagatctgttttctgacatgcagagttacatttttttcttctaataaacatgaggaggtatgggattaagataagtgagatgaacaaacattagattttatgccaagtgagatatgaggaatgtaaagacatttcctttcttatgtatagttaaagggaaagtcttgaaagaatgaatgtgattattcttctggttctaaatgctgagtgataagagagtctaagtgagacctttagcctttgtggtctgagttaatgtgtggtctagccctccttgatagtcaaatgagttttcaagacttgttgctacttccaacctctatgagaattttcattgtgctgtctcctgctatgcctgccagtaaaaatgtggctggcaggattcaggatctgatatttataccaactttcaagttgtgtattttatgagtagaaaactgtcttccatgccaaacatctcacatttgtgtatgcttctggtgcctattattttcttgtgtcttttacctccaaatagtttaaaggagcataattttgatgtagtctaaggatagtggagtctatggtcacattccaagtgacagtgactcttcccttattcagatgaaaatgcaagtgacactagtcaactcttttcagtgaattggctgtgcttgcgatgggaagcaaaggtgtcagtcccaaagtgggaagaggagcatgattgcctggaagaccaggagggtaatctggccatgctgactgtttgacagagtctgttgtcagcttgccaggacacatgctggtcatcttgacgtagcctaatattggccctgtccaaagctatatttccaatcggcattctgccaagggcagagaattggtcattgatgatacatctctcaggtatataaagatatgacattagtgggttttttcctgccagtttgtcagagataatgctgcacattttcacaaagcccatttcccttcctcctgggcacacaggtagattacattccccagcctcctctgcagttggaaggaatcgtgtgacaatttctggctcgtagaagtgatgtattgcccttccaggtctgcctcatgaaacccatacctgatcctgtacattctcgctcctctcagctaacagctggactcaggggatgtgaaggactgtgagaccccatggtatggtggagtaatagctgcaaggagcatcatttctaaatggctgtttggaacacagccccccaccccacactccactgagctgcactggatattccattttccattgttaagccactaggatttggaagatgtgggttatggtagttggccgactgtacacagttggaaaaactgtagagctagcagactctataatataatatgcaaatgtgccttagtagatttagtgattatacataaaacgtgttatcaagggtaaactttctgtttttattattcttttaacttttattttaagttcaggggtacatgtgcaggtttgttatatagatagattgatagcatgttacgggggttactgtgtgttatggggggtttgtgtgcagattatttcatgacccaggtaataagcatagtacttgataggtagtttttcaaccctcacctcctcccaccttccaccctcaagtaggctgtggtgtttgttattcccttctttgtgtccatatgtactcaatgtttagctcccacttatacttgagaacatgtagaatttggttttcttctcctgtgttagtttgcttagaaaatgacctctagctccatccatgttgctgcaaaggacatcatcttgtccttttttatggctgcatggtattccatggtgtgtatataccatatcttctttatcaagtctaccattgatgagcatttatgttgattccatgtctttgctattgtgaatgatgctgcaatgaatatatgcgtgcatgtgtctttatgataaaatgatttatattcctttaggtatagacccaataatgggattactgggtcaatgatagttctgttttaagttctatcagaaatcaccaaatgctttccacaatggttgacctaatttacatctccaccagcagtgtataagcattcaggggtaaatttttaaaaagataggtgaataatgttagaaactcacatccattggtgctatgattttgaaagaatacaagaaaaaacaccagagaatttcacttttctattccatttaaaagcatttaaattacatgtatgtcttttggacagtgctgcttaaacatttctgcctactgatagaataagagttattctattgagactaaaggatgcacagacattgattcttttaactcccaaaacaaaattatcttttttactttatctgaaaggagcatttttataatctataaaaatagacttgaacctgtttaatcgaattccaaattggtacccaaattaaagtttgccagattatatttttataaagtatattttacctttaatttctcaatgaattaaaataagttaaacaaggaagttaaaatttctttttacaaagtattttgcattgaatccttatgcaatttctaattctcccagtaactttctagccgcatctatcttttcaaagagcctcccaggcaattcatcattattaaatgacttaaggaaatgaaaaatgttccccaaaaccttttttattttttgtgtttatgggttggtgtcctataaaagaatggtgaatacagaattgaaattcatcattaggtccaattaggatcaaatatttactatgcatcagcagctgcactgaatgcacttcctcagatggaaattgtttatggctaacgtgctgtagcagccacgaagccctcatggccgtggtcactggttctgagatcagtttcctccttgtggaatgtctttcatcttagtagcagcggctttgtatatttggctagaatttccccagtactctaagtgtggcatattaatgtcaatttaaagatcaactattgtgaataataggcatgccatatttccttgccggctaaacatccattaagtacctcaaaagggatacagattcttcaggatatatattttgcatgactaaatgggtcagaattcattagcaatttggaaggataaatagaaaatggaaccagtagctgggtttcattaagttgtcgcttctttcaatcttctttaaggttattttccacttattctatctgaattatttctgtaaaggactgtgcttagcatgtcattgctttccatcggcatgattttgacagaagtaatttcagttttttaagaaaagggtgatgaagctgaatatatctttttaaaagtctgctgcagggctgggcacggtggctcacgcctgtaatcccagcactttgggaggccgaggcgggcagatcacaaggtcaggagatcgagaccatcctggccaacacggtgaaaccccatatctactaaaaaatacaaaaaattagctgggtgtggtggcgggcgcctgtagtccaagctactcgggaggctgaggcaggagaatggcgcgaacccgggaggcggagcttgcagtgagccaagatcgtgccactgcactccagcctgggcgacagagcgagactctgtctcatataagtaaataaataaataaataaaagtctgctgcagtatatgtacatattttaaaattctaactacagtaataaatgttgcttacatttgtttttaataaatgcataatgttaacatttgtcaactgtacaatactgggtaatgtttatttttaagatacttttctgttttccctgggatcctctaaatttggtttctcagccttggtgccattgacatctggagccaggttgtgggatcttcttgcgtgctgctgggtgttcagcagcgtctctgtcctctacccacacgatggcagttagcacccccatccccactgccagctgtggcaaccaaaactgtctcccagttgtcaaatgttccctggggagcaaaatcgccatggttgagcaccactatcctagataataacatatttttaaatcgcaccttaatgcaaaggtactctgcttgtttgcgatgctgactctctagcaaaaacccctctccagtgcatcttggagttgttatccccactgctcctgtgcagaagcttctcctgtggaatgtcaggcatctttccttgacttcccttctccctgtatttcctctcccctctgatgccctagcctctttcgttcatgtgtacgtgtgcacacacacacattctgtctctgttgtggtcagtatgtatctacactctttggagtggtgccttcaccatcttctgaggacctactgggcagctgcctctcctgcacctccctctcatgctagaatcagtcctcatctgccctcatcaagcttggtcagaggttgcctttgcctaaggatacctgtttcttgctcctttttcacctaatttagcaaaatgtccaagatgatcaccaaacttctgtcatcttgctttgtctcatctcttctcactttgtctcatctcgctttgtctcagcctgtctcgtttcggtttgcccttggtcttcctcatctcttgattctcagtgtagttcctaacatccaaactgacttagccacctacatgcttctcaaaaagttcatttcgtccctgtcctttacctcaatcctacctggacagttcctgaatttctctctctttctctttttttttttttttttttagtatttagagctaagagcattcctttaccatttaatggaagaacccatgttatataacaattcctctatgatttgttgagcccttgtttaaatcctgtatcatgaacttttcgtgtggtatgttttgtctccccaaacaaggcaataaactttttgagacagaaactatattgtaaattttttttggatcgctaaagtgccttatatatcatgtacatttgaatgctatttgctcatgtgatttgaattccaactccttgacccacctaaggtcaaggagaagagagagaaatgatatcaaaagggcagggggaagaaataagggttcctaagcagcttgtaccttacccccaactttccaaatgtaattgacagccaaaaatctaaatcaagagcccagttttcttattcaaattgtctgtcactcatgagcactactcactgcaccaaagggagcattttattctcaaactagcaatagaggttgaaagttattgtttgtttgttattttagaattaatgtattttcaatatggtaccaaataactgtgtaaggagtgtattagccagcttaatcaataaacttcagcaaggatcggatgttggggactgcacagcagcaattgatccactgcagagctttctgtggtgcagtgtgagtgggacactggaacagcatgtgtaataatcttagctgttatactctgatgggtcctatgatgctacggaatatgtgagtcttttcacacctatgattggagccacgtggatcctgaatgcagacccgctctcagttcttcctgtttccactgtttccaaacacacagtgttgtcgggattatgagcaaatttaagcctatggtttgatggtgatgaaatgaagcaggattttacaatttgttcataattggtatacacagtgaacacttaaaaaatcatgctttgccatccttttctttttgcccatgaggaatagtttcgaaagagttcttaagaacttgctgtgagttacatgtctagtgagtggcagggcaggggtgctaacctgggtctgtgggacactccggcgtccagctttagtccactgcacgtagtgtctttctgcaacatgcagatctgaacagagggtggtatttgcacatatccacgtaagtggggacatttgaacagttaactgtttccccagtgagttctcttagcaaccaaccttccagtgtttggtgtttatagatggaaaatgaagccatagccccatgacagagcagcaggagagcaacagtccccaaagaataacttctcatttctgttaataaggagcctaatgggtggacgtttagtcagcatgcattttctctctttggttgcattaagagctgtggtctctatttctgcatttgttttctctaaatgagcaactgaaactatttcattagatccataaactcctggcaaactagtctatctggcccattctgcttttgcaccaaaattattaccttaaacactaatgcatacattgaactaatgtatctttactgtttcttctctccataaaattctactggtctaaaagtccatataccctaaggtaacacagtgtcacacacttatgtctgtaattctgagccagaatgaccaggaatcagaggtctgtgtgattgattaattgattttcaatcccatcaggatttcatcttaaaagttttttttctttcttgtcattgcttaatacaaaatgacgactctatctccttctccctgaagggtgactctcaatgggatatcaagaaggcaggaagatcaaaacaattaaatcttctctgacagctctgctgttcccagagggtggctcagagaaggagcagttcctaggagctgctcttggcaacaacctcaggccatcatcaggctgttgagctatggcaatcccagtccccagttgctttcatgctgactgtccctgcacctgtctccctcccagatggcttggagcagcatccacatcccaaaccctccctgaacaccactccagtggttagctggggcaatgtgcctgccgatccctactggtggctgtggagttccctaaaaggttcttgctataatctttttttaaaagccaaaacagcagcaagccgagccatacttctaacatctttttgggaactttctgccgtgctctgagtttgaataccatcttagcttggggctctcctgcattcttccccaggtcctcatccaagaatattgtaaatggggcccctcattctcaggtggaaaggtgcttcttggagtagggcacagaagctcatcaataaatgaggctccagaaacagcctagggaaatcctccacttgccgaaggcaaaatgtaaaccagctctaatcataagccaggtttagctatcatttttcagtatactacttgaactatccaaactgatgagtgagttcactaacaaaatctaattgaatgggaaaattattttgaggtagttaacatatcaaccttatttattcctaaaatgccactaatggcaaaactgcagatgcaaaatccgtaacacaccatctctcgtcatcagtgctgaggtccttaaaattgctcgtgaggcctcccttgctaagctggcatcctgtggaggctgcttttgcttctgtgtggtgggggggcttaggcagtccttcaagatttcagagccctacttcccagctcgccttactccaaattctggaagcagatgtcagtgtggaagaataagattgatggagactagactatgaaaatattttcaagaccatattgcctaaatcaaaaccagcatgattgaaaattctccctgaagaatacgcggggctcctggtgacagagccagtcacacacagcaactgcactcctcgcacgccgaggccctgagctgcaacttacttcatgaaagcccagccctacctgatgaagccccagtcatgtgcccagatatggtacagctagatgctaattttctagttccaaagcaagtcaccaagagcagggctctctaccttacagtgggccacccgaaaacttacaaaatgtaccttaaataaaagcaagctttgttaccagattttagcacagcttaaaatgagccagggagaaatgtgagcatctgtggaagcagcaaagaccttgttttttttttgaaactgagtctcactctgttacccaggctagagtgcagtgttacggtctcagctcactgcaacctccgcctcctgggttcaagtgattctcctgcctcagcctcccaagtagctgggattaccggcgccctccaccgtgcccggctaattttttgtattttcggtagagacggggtttcaccatgttggccaggctggtctcgagctcctgatgtgcccacttcgacctcccaaagtgctgggattacaggtgtgagccaccgcgcccgagcaaaggccaatttttcacagctccaggcacggagtagtgcaggctgggggaggacgaggagaaaccactgccctgaccaccatgggcctgactcatctgtccagggccacagtggggagcagcaagtgaccagtgacggtggtgtcctggaagcttgtgctgcccctgagacagggcccaagtgccttgtcttctatggggctcttcacagaggggccaggtacccctgagcacactgccatgaacttgtgccctctgcttctttccagtcagatcactgactattgactaatgcttacactcaagcgtttgcaagaaattcaaattactggtcctacaataaagtcacatcccttgttcatcgtttaaagcctgcaggttgtattagtctgcttgggcttccataacaaagtaccacagactggtggctttgatggcagaaatttatttctcaaagttctccaggctcgaggtccaagatcaaggtgagagcaggtctggtttcttctgaagccttcctccttgtcttgccgacggccaccttcttgctgtgatctcatatggcctttcctctatgaatgcatccctggtgtctggtgtcttttttgtgtgtccaaatttcctccttttttgtttcgagacaagtctcacactgttgcccaggctggagtgcagtggcatcataggcgtgagccactgcgcccggcactcttcttaaggacaccagctagattggattaaggcccaccctaatgacttcagtttaacttttcccctctttaaagtccctgtcttcaaatacagggcacaggcacattctgaggtcctagggggccagtccttcgatacatgaatttaagagggcacaattcagcccataacaaggctgcaacaaatttggtggaaaatctggtagatgggagaagaaagtctcttcataaagtggtagattcttacagagtctaagcctcacacaagagtattttgcttgggtattcctcaccatgtgtcaaccacaggatgcatttctcagcttgtcctaacttggcctggtctgggactgctaactccattcccacctaagaaactctaaccagataaggccgggcgcggtggcccacacctgtaatcccagcactctgggaagccgaggcaggaggaccacttgaggtcagaagttcgagaaccagcctggccaacatggtgaaactctgtctctactaaaaatacaaaaattagccaggcatggtggtgcacacctctagtcccagctactcgggaggctgaggcaggagaattgcttgaacccaggacgcggaggttgcagcgagccaagatggtgccactgccctgcagcctgggcgacagagtgagactctgtgtcaaaaaagaacaaaaagaaaaagaagaaactctaaccagataagagagactacgtggatccaaagaaatccatcgcccttctgaaaaacacccctgaaaccatgccttctggtgatgtccgcggaggactttgagacacaactacgagtgtttgaattctgtcgcgagtgagtcctctttccatgacctttcaagtcccagaggcgcagagaaaacattgtctcctgtaaatcttacccaaaggccccttgatgaaaagccacctgctgcttttccctctatgcttctgtcactttgttattccctctattatttcttctgctgcttccttttctgtagttcacagagtgggaggatagagttaggactttggtgatatcgtttgcttctctttctgtagagacaacaaaaatgtgaccaggaaacatatctgtgaggcttaggctgcctcacttttcagagaggccaaaatggcagtaacagtcatggccaagagcagtcactgcagcgatcagtcacacaggctttcctccccacgtagcccgagggatgtcttcaaatcgggggagggggtagataggcttaaaaatgaaatatatccgttgaagaaaactaaaaagagaatgcatttgtctattgctgttttgtcttttggctgtggaaataatatttaaatttaaattctctccaagtattaatctaagtattctactaaatatagctattaagtatagtgtgattgcttgcagtctaaggaaatttgtaataggtcgccatcaaatcaggatctgcacctcgggtgcacaggtgctatgaggaagatgtgatgtgaggttggaaggagcccactgtggcttcagtcctccttgtctacctgagcataagtctggaccatgattagttaattcttaacgcaagtgaagcaggcattttttttaagacaactgtctaaaaaatatgaacgccaaaaattggaacagtccctgatctctccttacttgcgggagaatctgggaggtctagtttgtgttcttactggccatgttcaggttggtgctcccctaccaccggcatgcactctcggatagagacactgcttccctagtccccactgacagcacctgctcgggcatctttgcagcatccctccctctccatccctgattagtcccacatccaccttcccccgctgcaatggagatgtactcactgcctgtatgcccacctacctcagaacaagccacctgcatcacacagggagagcggccaggtactgtccatccctgagccggcccacaagtgtcttctgttttctttaccctctccttagcaccagctgcctaacaaagtcagcgggcagccagggcaaagaacagtttgggcgacttcaatatgactctctcttctgagcccccaatccaaaagaaggctcacccttagtgaatgtgcctttgccagagggtcttccctagggtgaaggggaaaatcatgtttcacaatttcagggaagtctgaatggtaggagccaggttttcacattctggtctttaatgcatagtggccattcattccattaggcttcttatgtcatgacataatttcatctctgaatgttggaccatttggtggacttggacattgtcagttcatcaaacagttttgaatttgtggaaagttctcattctgagattctgaacattcaaagattaatccgatgtggcaggctcattagtgccaccacctgcctgcatggtttgcaagataacatcacttcattgtttgatttgagctaaagaagattaatgatctgaacaatgataatttatcaatattcttctatgaaattcaaccaaaaccatagatctcgtttcgtgatgcagagtctaaaatagtcaatggactatttctagcccaacagtacactgtagactagagtaatatgctgatttagtgaaacagaaacctggatccaaaacccacaaagtactcttggggaccctggaaaagcctgcatggacctcctacagttcaagttccacatgaatgcaataatgcatacaatggggtacattgtttcaaaaccaccagcccacatgtaatcattgtgtaattgaataattataatagcatccaaccatatgaaattttaggaagtgaaaattggagatcaaataacaaaaaaagagagaagggaaggaggaggaagaagaggaaaaggaggaggagggggagaagagaaagggggaagtggaagaggaggaggaaaggaagggggagaaggaggaagaaggggaagaaagtggaaatgggagaggagggaaaggggaaaggtgagggggacaggaggaggaggaggggaggaagaagaaggagaaggagaagaaggaggaggagaaagaggaggaggaggaaagaaaatagaagaaggagaaggagaagaagaaggaggaggagaaagaggaggaggaggaggaaagaaaatagaaggaggaggaggaggaaagaagatagaagaagaggaagaaggaggaggaagaggaataagaagaagaaggagaagaaagaaccagaagaggaggaggaggaggaagaggaggaagaaatcatctgaatcaggaggaggaggggctcaccatcagagtcttagtttgccctgtccttccactcatttgctacctgaaccctctttcatgtagaatttgtgggagttggggaggggaatgcaatgtgactgaatagattttgaagctaacagagttctaaactactaggtgtgtacatggaaaggaggtgataaatcattgtgtatcacagtttttagctctatgttttcatcctcagcaatgaaggacaatgtggaagaagccatcacgaaactcagcctggtttgggactgcttttgcttccgaagggctatttgtctgttcttcaccatcccaggtagcaaatggggagcaaattgggaaatctgcgcaaaattaatagccctatcaggaatcaagcgggtatgccagagagagagttgaaaacagtctgggttttcatgctgcaccaaaatttagtgagctcaaaagacttattaacagcaaatttcccctaagcagcatgttgtcaaactagcctgcctcactaggatgccacgaaaaaataataaatggaaattattgtaaaaatataatttaaaaaggacaatgtgtctaatagagtagcactccggaacctcaaccttaccccctttctaaccttgagatctaaggcttagatctagatttctttcacagatgggtgtaaaggagatgcctctccaggaaaccagctggtcgccaccacgtccaaagggctgggaggtgcattcgctgtgcccgcggggctctttagaggttaggatggtgctgactcatgctgcaagttgtgcagctgtggagtgtgtcagatagagtgcagacagtctgaacttcagaagctcgtgtgtcccaggtgtgcaaatcccacatcaagtagcacaggtcaaggcttaggacacgcccagaatctaatgtgtcagattcatgaatgattttggcaaatattcctcttgcctgactttcctacattttctctccttttcactatagcaaatatatctttatttatgattctcacctcatttagttaaaacctttgctaaaagtttatttttattgttaccgtgataacagctaatggcatgtgagtgtttactgtgtcaaaggctctatgatgtatagtttagggggatatcttattggatccttgaagaaaaatgccctggaatggaaaatccacgaggctgtggcctcttaatctgtgctggacatttctggatccgtatgtctgggcagtagtaggtgctcgatggatatttactgaaggaatgaacaaacggatagaagactaaaagaacaatctatgaagcaggtgccttattattcccatcttgtgatatgcaaggttaagtggccaatcaatggtggcaatgagattcaaagccaggcagtctgtctgcacagtcatgctcctgggtgcatatgtttatttaggcctgtggtttttgctttgttttgttttgtgttttaattcaccacttgctttagccctaaagtgccagccaacagccttgaaaaataagattctcaagggttgtttgaacactacccccaaactgtgtagccagggctggcccctgagagctagagattatcgtcttcatcagaattagcagagaaaacaagccagagagacaagtccaatcagaaataatgcagaggagccaagatgccgatttcagagaaaggcaaatcagcggatggggagggcctccagccttggcaggaccagcagctgtatcaaacatgaactgttgggaaatgtaggtggtgagacaaagtgagcacaggtcagggtcagtgagtgaaggacccgtggggcgggaggccacgagcaccctaatacttacctcaaaggacaagcatttgagttggctcccaaaaaccagcccagtgtatgatttctggctgggtatgtccaatgctatggaccagaagtaaagcaggtaatttttttttaaatgtattttaatttattttatgtagaccctgttgctgtgttcaagcagggccacaagagcaggagtatgtgataaaaagtgaggacaggccgggtgcggtggctcacgcctgtaatcccagcactttgggaggccaaggcgggcatttgaggtcaagagtttgagaccagcctggtcaacatggtgaaactccatctgtactaaaaatacaaaaattagctccggtgactgaggcaggagaatctcttgaacctgggaggtggaggttgcagtgagccgagatcatgccactgcacttcagcctgggcgacagagcgagactccccctcaaaaaaaaaaaaaaaaacaaaaaaaaaagaaaagaaagaaagaaaagtgaggagagggcagctcttgggcctgacctctgttcctaatgcaattgcaggactgaagaagaaaaaagtacttttcatgcatgtccctctgttattctctctgcctttcttctacttgagtcctcttgccctttctgacataatgctaaaggtttctaacgatgcccctctttactgtcttatgttacattatgcctacttgtgttcatagacagagtcatatttagtcaaggtactgaccacaggtcctaattttgcaaattttggttagactttctcgacatatttttggagtctgagtctatgccagagaatcagtgcatgctaggctgagttggtgctggtttgagttggtgctggtttgagttggtgctggtccgagttagtgctggtttgagttcgtgctgatctgagttggtgctgggctgagtttgtgctggtttgagttggtgctggtttgagttagtgctggtccgagttagtgctggtccgagttagtgctggttcgagttggtgctgatctgagttggtgctgggctgagttagtgctgggttgagttagtgctgggctgagttggtgctgggctgagttggtgctgggctgagttagcgttgggctgagctggtgctgggctgagttagtgttgggctgagttaatgttgggctgagttaatgttgggctgagttagtgttgggctgagttagtgttgggctgagttaatattgggctgagttaatgttgggctgagttagtgttgggctgagttaatgttgggctgagctgcctattttgcatttggggctcccaaaattcacttcctgctgcagcgcagattggatgaccttcaaggctctatttcactgactttcagctttcttgacgccaaagccacagagcattcttgagttggaaattacctctttgcaaaagcaaagagcactgtaaagaacttggcctgcccactccacagtgatattccataggctcaagtttctgtgccacttgaattctagcagtttagctccctgccgtttacgtgccagcagggatgaatgtcctgacagcgtgtgtccactgtgcatgtgcttccacttgtcagcatgggcgaagcccaagtatgatgtgtagacaagaccaccgcttctctctgctccattcctgcacaagccacacacagcagacttgtatttctgtcaagggctccggttttccatcatctattttttatagcactgatactcaaccagttgcagcaaatgaagggtattatttctggtttgagggcatcgcgatgctgatttgccattcctaggaagcaaactcaccgtgttgggctctcattttaccatgggagacccggctccacaaaacgtaagtgtttggagatgcttgatattttcacaatgtaaataacaatttccccatgcatgagggggaagggtcatatcataagatgggagagggatggaaattttattaggttcaatttgtggcagggtgacagtgggttgaagacaagcaaaataatttgctgtgtccttcagtttcttagtgtatcattaatctttgagagaatttgggtatattctgaagcaacttggtagcatttcagaatcagtgccatgtgctctttctgaaatgtcacatctcctcatagcaatgtgctctccatataaagtaaacctgcatttttagattttaaaaagagtgatgaagatttggaaaccaagaagcttagagggaaccatttctaaaggaccagaagccctcatcctgaacacacacctcaatacgcacatcccctcatgcaccaacaaacacatagactttcagaatttccctgcaaactagcaataacatcaatttagaatgcttttcgcttatagtagatttacttacaaggattagttaaatatcaataacaaatacatgcattttaagttgcccaatgttaagtttcaaatctgtagcatattaattccaccaggcctttggtggttttgcaagagttaatgccctacaattcatttctctatgaatatttttcacattttaggtgtatagctattattgctttttcaagcctgtgttttgttttgccctatatttccaactgtaagactatttattcagctttttgactttgtgaatgtaattaacattttaactggtaaaaaagaaaataccagtccaacccatacaaattgctatttttcagtgttcctatgtgcctatgctttatccagcagcaagatcaatagaacaccagggtggagacaagtcagctctcagctgcattattcacttgctatgaaccttgacagctcatttgcaagttcacacttttttgatgctagagttcttgaatccctgacagctgaaccttctaactccagctaactatgcaaatagagaatggaacccagagggtccccttgcactggtatcacttccaacatattattttggtcaaacacaccaatcaattcttcttgaatgctttctaataaaaggaaacagtatgtggagagtgaaaaaaagggagacttgaaagtgtaacaaaataagcctgaactttgtgagagtcacaaaaagaattcaaggcctaatatttaatcaaaattaatttaacaaaattgtattaagactcctcccttagacccacttggggaatgtttcggatgctttttctatataaagatatgtttaatctgatagagcaagtggaatttttataacccagaaaaattatttattcttagaaaagaaaaaatcctggacatgtgaccagatatgggaaaaaatatttaggggtgacattttttggcacgaaacaaaaagaaaatagtttttttatgaaatacttggcaaagtagaaagcttaaaaatatttcgaaacttgcccggttgcaaaaccacacagcatgtcttgttttttctgttttgggaaaaggaaaatctccgggctgggatcggctttatgaatcccaacacttcacttcccctgacaggaattagttaaatcaactgaagtcctgttggaatgcctcgcctgtcatctgttctgcacaaaaatgaaacacatggcattctaagaaaatcccgaaagcagccaatttctcagaaaatatttgaatgaccctggaaggttaatggcacagtcatttacacgaaaattgctttagatgtggaaagggtattgttctagggtcagtaaagtgtatgtgtcatctcaaagctccacataaacaggctgtctcgattgacttggaagtggaggcagatgttgaggaaggcgtggacagcacaaaaacattctgtgattattgcttcttgatgccgtggcttccctctcactgttttccatcccgtagtgtgtccgtttcacgaagcagtgtggctgccattgtgaagggacacctgagcgtggcccacactggggagcgcctgtgcccctccgcctcctccctggagctcccaaatgtgtttctgtagctgagcggagggtggaaaggtttgcttattggcaggaagcttcactgcactgttaaaactgttttcccattttacctcagaactcaacatgaggtctcgatctttagacggtggacagaccctgacttcgtgaaggttttgcatggtcaatgggaaagtccttgccttcctcatatctgcccaccacgctgcggtgcccatccccgcagaggcagccgccttctccacggctggcctgagaccctgctcacggccccacccctcgggtccccacctatgctccgaaagcagggtctccgagctctcatgggtctcacaggctgtctaggttttgaccagacagtattttaggttttatgtttcatgacagaattccccgtttctccccactgcccactttattttaatggaatttcttttgaattgcacctgtattgtcagcacaggcctccctaaacggtacagccatccagggagggcgatggttccagtaaaggagcagacacattcctgaccctgatggaggagacgggagaccacctgctctccacaccccctgtccccagccactttgctttctcctgcagccaggcctgggctgctgcggttcttttctatcaaacctctttatacccccaacctggaacttgaaagcagaggaaattctaagcaagattaacctctccttctatcttgccttgaaaacagtaaggaagcaatgcttttggagcacttaaataattgctgaaaagggaaaaatcgtgggcaattctgacaccagtgagcattgccagttcttccttcaggcactgttctatagggaaggaggttagaaactcagattcatggatgttgctaagagcaacccggaactcagacatttttcactgtgctttccttggcatgccaactcgaaggagaaatgttagcaatggggcacagggagaaaccgtgccagtaggtatggtattgttaggtaaaatggagcagccttgcttgtttggggaacctttcagtctccccaactatggactatcgggttcctgattttccaagtccctgctgagggtgggatgttgtgtggatgatgtctttcccctctgcagtggttgtggcacacacagacgtgtgaaccttgaccacaggctcgacacaccctggtgtcatcgggtgggttgtgttccagtggccctgagccaagcaagaccccaggaaagactctggaaaactgaagggggctggatgtcacccacagtacataccttgtgcctgtaacgaagcaggcactggtttcatttaggaaaggtattgtgtccgaagccccatttttagactgttaaaagtatacaaacagaaacgaacaccgccatcattaactgacaatctgccttctcttcctactttctctggagtctcaggtctgcccagtaacctccagaatgcccagttgctttgtggtcaggcttcttttacctttgcaggcccagggcactcacagaccaggcaagacttttaaatgagaacatcaatttgctacttgctttaatcccaccattgccttaggtgcaaagcacacttttttattttaatagaagcccaggcttgcacaacaccaccttcatgaagattggtcatttctgaggatgacaaaaccacaaagtttattgagattgctccttcattgacagtctctaagcacttcagaagcaatgacaaggcaaactctgtgggatgatgacaagggtccctcgcgctgcggcagtggagagtgtgtctgagccaggctgtctgtggggagaccccaccccacccctgagacctgggtgacttggcacctgtccacggctctgcttctccatccacaaatgggaaatatcacaggccctgccttgtgtgttattgatataagaacttggaaaagagcttgctgtaatagtaagcatggtagatgttggctgcaataaataattgtgttgctgggaactcagcaacattaggataatattaaaaataaaatttaaagatttttctgggatatgtgttaattgcaacggttaaataaggtaaacttcatgaagacatgtatagaattttagttatctataggtaaactacttattttaattcatcatggactaaggggacaaaattgcacccacacacacacatacacacacacaaacgtacacacagtaaatattttcatgatatcgtctagggatgtcaaattaacaaaaattaacataaaaacagatgcattttcaatgagattatcatcagatattatttatgaacagcttaaatagaatgaagacttggaaggatttgggggaaggctcgcatgtgagtgtgtgtgtttgtttgtgtgtgtgagtgtgtgtgtgtttgcccttttttccctttgttttcaggatagttccatttagaaaaaaaagctttcctaccaaatttgcagatatctgcaaataatattctgccaagaagcaaaaaaaaaaaaaaatagtttactctgattcaatggaagcgaatctcctaggatgtcctcctagcagaggacatgttgctgttagagcactgacgtatctgcagaaacatgccttgcttttcaccgtgaaatcagggccatcccttgaaataggctgattaggcaactgtctcatgaagggatatgaggacccctggcaagttcccaccagcccccaggcagctccccacatcccatgaccctcttttcctacctggtctcaaattcctgctcattaggtcaatcctgtgttttgaaaatgcacaggccttgtataaaatttcttataatgtgtctgagagaggagtgtgatccttttctgtctgcacagtgtagagccttaaatggtcagataagctgctgctgcagccatataagttgtagagagcagtccctgaaagggaattccaatagtgaaaagagtctgcaacagaagattgttgccaaatttagagaaagaaaggatcctcaagagctggtgtaatgatcaaggatgagggggacctgaagaggcttccttgcaccctgagtggtttcaggtagagggaaggctttgaagccccagtagggagaaggctatggagagagagagcattttgggagagctgactttaaaatgctggaaatgactttgcttgcctctcacccttcctagctccctcctctccccatcatcctatgcagagttggaaaggactggaaaagcaaggaggaggtgggaacggcagatgcgagggatattaacactatggcctttgctgtgctgcacccttccattctattaaaatgctgaccagtggccacacaggaagctttgtcagaggaattttgtatgaaatagggggcaaggaaagaggaactgaatcagcaaaaccaaccatgaggctgccaatatcaccctgcctgcttcacccccacctaaaaccaactctgggtaaaacagccccaatttccccttttctatataattagctaatggtgactaattgtagtatgtaacaaactaaaaacagtaagtatccacccagtttcctttccgcggtgtttgttctgagaagtaggtaggtatcaaactgtgtaaagaaaagaatatatgatgataacgttgtcctcagtttgatctcgccgctgttttggttgttttggggagtgtggggcagaccccacccacctatttattgtgacatttcttttctagagcgagaataggacagactcgtataccattctgatctgggtgcatttcttcagaaggtacgctgtcctcacgggaaaccgcccgccactgcctgggtttggggctgatgaggccaggaagaaacttaatgcgtgcactctaacaaaaagatttcccagtaagttaagaaaataagacggtgggcaccaaagaatatgcgcatgccctgacatctccttgacgttcacgtacgtgccactcccagcagcatgtctgtcttgagaacctgcacagacacccttgatttaggctgattgatttgcaagagggcaggggaacatcagaggaaatgaggccaggagaaagcaaggatatcaagagaactcgcttttttctcccagagtgattgtttttgaattcttcactctgccttatttcagagtggaatagcaagctgtaggtctaaggcacatggcgaagaaactgtaactgatccccttgtcctaaagcgccttccttcatgctgcttctcccttcccatgtagtgtctacctcttctagaggatgcctcttggtcactgatgcttcaccggggaccaggaacgcccttatccccaagcacacaccttgtctcagcccctccaagcccctccagcccaccaatgtgcagtttcctgcttctccacctggctctgcccagtggggctccagagaagcacgggatgggcccttgctccaatgtcactgttcgctgtttcggggccagtgggcggacccccgctggcctgctggctcccaggcctcctggctctctctttctgaaatcatcacactcaagggttatctggattttaccaccaccacatatcactcatctaactcagcatggagaaacttacccaaatctatctccccaaaagcaaatttatttagctctcttaccccttcaagtagcactggtgcagtctttggattgcaaaagaagagacacctagaggctctgtttgagccactgtatcagtttctagagcgctgcaacaaagtgcaaccaattgggtggcttgaaacaacagaaatctattgtctcacactctacgtgggggtgtagaagtctgagatcaaggtgtcagcagggccgggttgcctgtgaaggctccagcagcgaatccttcctcacttcttcccacttctggtggttgctggcagtccttggcttatggcagcatcacccatctctgcctgcattgtctcgcaatgttctttctatggatctgtctccaaatctctctctccatgtaagaataccagtcattggatttagggctcacttttctccagtatgacctcaattaactggattacatctgtaaagatcctgtttccaaataagatcgctctcacaggtactgggggtgaggaaggacttcaacatacctttttggggaacaccacttgcccgcaatagctacttttggatattgggtcatctctaagcaagaagcagctccaaattgtctactgtaagctcaacacacagcctttggttcccaaacccaacactcatcccttcccacatctgcagaactgacccactctgcaggggccccaggagggggcctaatgtctgtggggcaggactgacccatgtggtccaggctatttctgagtaaagccagaacccagaggactaataacccctcacagtcacataggcactttggtctccctgagaaatcatgaacctctaaaaccctggaaaatatctatatgaatatccacataagcctggaacttactttttcctaagtactatgatcatgcttgtaataggtgactcttctctgacactctctcggtcacactttgatgctcttcctattcacacatgctattgagattatcttccaagggaatgagtttttctaaagcctgatgtgtcctcttgattgttctgactttggagagtgacggaatgcctgggagtttacttattctcatgcacataattgagaagatcacccatctccactgaactttccatcttctactgatgcattactttcaaaaggaaagggttaacttcctcagtagtaaatcaggtttcacatgtgcatattttgcaaaaaaggaggtcagatattggagcacagacatcagattttgaaatttattatccacaagttacaataataattttgtgatactctttgtcctccatctgcacactgatttgattgtatatctagagtgagacagagaaacagacatatatatatatatatatatatatatatatatatatatatatagagagagagagagagagagagagagagagagagaaagagagagacaggcagggagggagggaaagagataggcagggaggaagagagagagacaggcggggagggagggagagagatagggagggagggagagagacaggcagggagggagggagagagacaggcagggagggagggagagaggcagggagggagggagagagatagggagggagagagataggcagggagggagagagataggcagggagggagagagagagataggcagggagggagggagagagggaaggagagagataggcagggagggagggagagaggcagggagagagggagggggagagagataggcagggagggagggagagagacaggcagggagggagggagagagacaggcagggagggagggagggggagagaacactttctaaaagccagtgcttggttattgcatcagagaatctcactgaaaaaataaattccaagaggcttagttaggtatggcagggcaaagatattttataaatattttggcaagtagagacaagagaaaatgatgcgtgaggtattttcaatagaagccaattgagcttcctcatttgcatgaagcatctgagctgttttcctaagttccagttcctcctcctcaggtgggcagccttacagcctctgcatttgactctgtcaagatgagactgtagtaaagtgagctctttgtatcattgatgaaagaaagaaaggatttaaattaaccattgggactgagttaaaataaaataaagctataaaaagatcatggctgcttgaccatgagaaaaacctagaaaatagtcatttgcatgagtcatttgttccccgagaacagcattctgttgaatggtgtccatgaggaaaatgctcaaatagataccattggttttttaaaaaattatttcatcagtaacaatgcaatttgggtacagcctgatctgcagctacgtcaggctgcagccttttgaggcttcacaatggctgatacatactcacctgttcccagcaggcagccaggtacctggatgtccagctccaaaggcacagctgcatttaacgcctggacctgcccaagtctgtgacctctgggactctaggggctgacctgttcccttgttctagctctgggatagcccagtgcaaacttactactgcaacccggttgtcctctccatggcctgcagctgttcacccaaggagtgcctgagcatcctttcttggaggaactacaaagagactcgctcaaggacttcctgtcagcagcagaaatgctgagtcatcagtattctgttacagttcattgaaagcagtgctgacagtggtgcggccagatggacaatagtgagagctccagggccccagctcagtgctgcacacaatgggtgacaccaaagaaaagcttttattaaaataatacagtctataatgaagaaattaaattttacaaaacttcaacccactctccagatgattaaatgaattattaggaatatttcttttccaaaaaaaaaaaaaaaaaagaaagtatattgacctttaaaaaaaaaaaattagaattacactttcctggtttgtaccttgtacttgcacatcattgtttggagaatatttttccatatcattaaaacattctttgaaaatgtaaacttcacagatcgagaccatcctggctaacacagtgaaaccccgtctctactaaaaatacaaaaaattagccaggtgccgtggcaggcacctgtagtcccagctactcgggaggctgaggcaggagaatggcgtgaacccgggaggcggagcttgcagtgagccgagatggctctactgcactccagtctgggcgatagagcaagactccatctcaaaaaaaaagaaaaaagaaaatgtaaacttcactagctacagaaggaattagacagtaaataagtaaattacaatacaccccaatgacagaatacgaaacattgatatctaatgttagagccaaaagttcttctacactgcgtgttatatttttctcacttccctgaaaaaaaattacataagttgtactgtacaagaaatgttttcttttctctctacaaagtagatcatgataattctaaacttaggcagaaccatctggaatctgagtcattagactaagtagaaagaaaaagaggaaaagtaatgaagcactcccccaggaaactgaagagctgtactattccttgtctttcacagagtagaaattagggaatctgagcaaatgttagactggatgattttctggaactaactgacctcgagtacacagatccacgtggctacagaactgtggtcatcactagactggacagtgaggagtgttctccccacatcagctccataaggacgaagcaggcagaggaggccctgagagtctagttccccttgttacttattcagaaaatggaaatacggatggaaaccctgtctatagttccttacagggcagtcctctgaaaccggggatttgctgagcgggcccagaaagagatgagtagaaagttaatgaaaaaactagattttctctcattttaaaatatgcagacttaaaagttagtagcacattaccctgaacaagagttttacttgttgaataccagtggaacttatacttcaccacataaggaaataaaggaaagtgggaaataagaagcaatttctatgactcagagatctgcccttcctgtaggaagatgaacaaccgccatttatagaattcttctcatgtgcccattcactgtgctaaatgcattacatctatgatttaatcctcacaacaaccactggcaaataggtattttgtcatcctatttgacagctaaggaagaagagatggaagggctgacttcattcattcttccacttactcccctcagaaaacatgcatttggctcctcgtgtgcacccagcacagttccagggctggagatgccactggcagcaaggccatcatctctgcccctcagggagcaaatggcacatgcagctggggtttgcatctggtctgcctggctccaaagcactgaaaccaaacactaaatgggcgatttaatgagaaacctgggagatgtcaccctgggagagaagaaaatagcattgcatcttaattaattttctccctgatctgagaatcgccatgattaactttagaattaggaacgactccgattaaaataatgagtgctcctgcgcatccttttgtgatgacaggtgaacacagaaggcattcagttaaccagatttagaaacaagagcctgtggttttgctgcttcaccagaaatcatcttaccgaccaccatgcttacacaaaacaaatggagaaagaagtattaccagttttcatccagagcataagagataagagccatcaagattactagagctagatggaatggcaaagacaggaccctagcaaaatacttccaactgattcccatccagaaatacaggggtttttggggcaagccaaaagccttaatcaaccctacagtcaggtgaaaacatttgcctaagtaacagacggtagaaccagagcttgaaagcatggagtcctggtcaggttctgtccagcacgctactcagtggactttctcggggagcacagtcactggttttgcataaaaccttccaggctccataatggaagggagaaccttagctgaatcgagttcttgggcaggctggatagacccgcagactcagaaagcaagcactgggttttcacaatagaaatatgtttttgaacattctaataatcaccacaaaagttattctccatgagtttactgaaaaaaatcaattataagaaattgaccatgtatagttttaagtgtttttcaatgtctaactcctagtcaaggattataccataaggatgggtttaatcataaaagccaaccatattccagtgaaagtcatcaaagaaaacataaaatctgtctggagcagattcagggacaaacattaatcagtaactcaaaacagtgattaaggtgcatttttctgaagctttattttttctgaacaagctgtttatcttgatttatgttaaaatgtgtagcaaacctggtcgtatcaaaataaaataagcctaatcatgggacatttttgtaaatcatgctttttgttacaaaatggtttaataaccttgataaatagggctggtttcctaatgaaagcctatttatttacagaagcttgttgaaatgaagttaataatgtcttcaggcttttcttttttaatgtaaacatgatctgataaaagcttaatttagtaatctgataacaaagttattaacctgtcactgatttcagaacaatcaaatacattgaaataaataagatttgctaagtataaatgcctgacacaaacgtatagttaaaaagtcaattaccaaatttattgaaatccttttaacttctacttgtatgtgagtattgttactttgaaggtaaatcattgacaaaatccattgactgcacctatctggttagctgtaattgtgacggcataagcaatagggtcgttaatacaaacgtggacaatccttaagaatctgtccactcttcagaggggatgagaatttgctctgatgaaactattttgatcacatcaatgtaggttgaagtgaatgactcgtttagtagccatggaaatcacaccaagcaatacaaagagatgagcacgtgtacttccagatgctgctgcttttgtggtggcgtctgtccagggcttctgatctgttcaaagcgtacttaatgtccctaaatccaaactcgcttggttttgctctccctttacactgtagttgattctctgtaatagcctcaagtaaatataaaacaaggcaacccaatactttacccacaggaccctatgttccttccagaaatgtgtctcctatttaaagatgcatgcccaaatgtgctaaaacagaccctcctcccggatgcatctccatagcttctatttctgaaatccctggtttatgtccaggcttccatactatatttgtgtctatttttccttcatctgtttctataactttctaatatattaatatttatacatttgtagaacaaaccgtgtaagaaaagaacatcaaggaaataagcaagcaatattctggttcattcaagccaagtctagtggtgtaacaaaatatattatatatataatatattatacatctaaatatccttatgtttctgtatatgaggtttccagaactattgtttgttagcttaagtaacagagcttatacaaagtaagcattgtaggttaagtatcttgggggaatgggtcttttgaaaaatggtccctgaaaactttggttattattctatttaaagtcaaattgtactattacattcctttgatatttaacccatatttattgcaagcctgttatacataaggtacgatgaaagacacagatgtgaataaagcatgatccctgccctcaagaaaacaccaacataaataacataaagtaagacaagatgaagtggcacagaaaaggaactatattagtttaaatgagtgagagggatttatgtggttttcataggggactattttgagatggacttctaaaactgtgtgtaattttaagagtaattagaggtaatctcaacgaataaaacatctcacaaaagatgaatcaaaatcacacctgcctcgccacaccagtcatgggctcctggaaggcagggattcttttggattatcctgacactcctactacccagaaaatatctgacacaatgtaggcatctggttaaaatgtgctaattaaactcaaatgaaggctaaaacatgaaatgtacaaaaaaaggagcaacaaaaagttcagtttgactaaaaaacaaaaaaaaactgagaaggaaaataaattcttgaaaattaggttaggatcatgttgtgttgggcttggtttagaatttattaatagataatgtgaagtcagtgttcctttcaaaatattagccttgcaattgcagcttggaattaaaaggagagagatcaatattagggggagaactagggacaggagagccaatgaaaagattattatgataatttatttgataaaataaaattaaaacgacagaaatgacaaacctgaaattagaagccatattaataagtactatatgaacaacagcaaaaacaaagatcaagacaataatagcccacatttatgatcaatccctatgtccaagcacaaagttagaattttgattaattacttggggttcttgccacacaaagtcgttactcccaagtttataggtgaggaaattgaaactcagagagattagctatgtcaaagaagctctgctagaatctatattgggatgctaaattagacggcaagtatgtttgacccactggcatagagttctacatggtaggtggcagaacccacatttagaagctttctcaaatgccgcttctcctttgaacacaagtgggtagttagaatatccaacagcagtgtaataattccaaacaagaacctctgcagcctggcgctttttgcaggataatttccatccttttgtaactaatggattatagcaggctgtgatggtttctagctgttgaccccaaaaggctgaagttcaatataaatattaacaggagaaatgctcaaaaatagatctgcctaaatccctttttgaactagtcaaagatttaccataattgataaaagaaaaaagcctcttcattaaatgataaactggcaacaccgtcttatgtatgattcttttgtttttaagtacactgagcatgaaagatatgcaaggtgctgaactaggagcagtgagagataaatggtgaaaaagacactatccttaatctcacagatgctgcggtgagagaaacagacgtgaaggaaactagtatttagcattgctcaaggaaagtgttttgagaacacagaaacaaagaataatcaactcaggaaaaggaaaatcttgaaagatgggtagaattttgtaaataaaaaggtcagggaaattctacatccagattcgggaaacagcatgagcgtccatggtggattccagggagagcagatagtctggcaaattgagagaggtggccgaagacgagagtgaaaaaggagaatggagtcaggtcatggggtggccttgaggtcacactaaattgttagaagttgacctctcagacagcagaggccccccatactttggctaggtattaggaagagtcctcaggcaacaatataaatgacagtgaagagaggtaggaaagttaggttagaacacccaccggagttctcaaaggcaaactcagtctcatcaccggttggcccataggatactgttttgtgggttaattctgcaaatatcacagcactctagaaaatactagattaaaggataactggtggctatgaagactattaactagctgctcatccttttgtctttttttttttttaactctctgggcagtggaatatcccaagtattcaataaaaacatgcaaaagttgtcccagcacagcttaagatcaaatttatggtgtttccactccccaaacacccaaacatcatcaaaaaaaagccaatactgaaagaaaataagaaacaagaggtaggttaagaaaccctggatctttttcatactaagcttcttttattgttaacttcacttggaagttgaaacaacgaaaggctaatttattagacccttgaaagcacttcctgctgttcaacagtacagaaatcggcatgccgagtagaggaggaaataacttggaatgtcaggtgctgatcagtagatgccaaaaacactgagaagggttgcttcttagttatctgttcttaatgtacatggcacaccaagaaaagtttgaagtaagcaaagtgattgaaaatatgtagctgccacgtggctggagcccatggattaatatactgaggttcctcttccttattcccttatgagcccaggaccttgacgttcactgaagaaaggtcagcgtgctgccctgtgtctatgaattactttctttcctcaactccacagagatagtggaactagaaagatgcctgctttaaaaaagaaacattacaaaacttcaaaagctgttacatttccaagcatggataagacacactccctacctcaagcccccaaattctgtatgccttaacaaatactggaaattactctaaggaaatgaatagaataagactcagactactgcttggagcaatcagcatctctgctctttctggctatttgagtgcactggtacgggctgtcctttcttctcccaacttcccttagagcctctgaattattttctcacgaacctcatggaaatagattgctctgttaaatacattgcttaggttttagcacattaaaacataccctgttctatatgatccatgatgcaagctaaattggtgctccttctccaaagacataaaactgttttcaaagttcttaagggagacagagtgaaacagtccttgtctctgtgttttcagcgaagttgccaccatgctaccagcaagaagccatctgtgttatgtcaggtgcttgcctctatggccagagttgtgccccaaatacgatatgcttttagtggctgtgggatttattttattttatttttttttaatggttattgatttattacaattttataaattaatttactaatttacaaataactttctgagctcttacatgtgcaggcactgtgctaggcctgttacaaactctggagaactgagttatccccatatacagatgcagatactgaggccctttggggttgggtgacagctcagatcggctgtgggatttattaatttctcagatgtttgccttcttcccactgtgatgacatgaatacagctctggcgcattttagctacaaaacaaaataaaattatactgaatcttagaaaactgtttattttcctgggcactttgggtaggcttttgggtgacattaaaagtgttaaaagctcatgctgctggttagtaggcacttaatatcaacaatattatcagtgattcagcctttaattaagaaaaaagagtcaacattcttagccagagtatgggtgtgaaggaggaggttccttatgggctcttcaaacaagactctttcaacaagtttctcaaaattctgtctcagaataactaataatctattcccaataattttttttatcaccaatcagatgccagacacagattcattgtagagtaccattctgcaaagcctgaagtgatattcacagttttcacacttctgaaaatatccaaaaaggcaatgtagctgcttcgtgttaaactacattagaataaattgcagagactgttttccaaataatgccactttttaaattaaatgcccacatgaatgataataatttagaattaacataatttatcatagctaattagaactgaagaatcattttgcgatccaaagaattagaaactctttttgtcttaccagaatttcacagatgtttttcatattttttaaacaaaatttggaaagtaacccatatgtccctgacactgttctctggaaagatagataaagcttatacgtgatcatagccgtttcatcatcctgtctggacccagtgacataatatgatctcttttttgtttatttttgtgggtagttctgaagcactgtttgttccaaacatctcttacagaattcacgaccttttaacaggtattaatggtgtttatatagtgacttggagcttaagtgattgttttggctgaaatctaaagaacttctcattttttttcttccttgactacattttgctacatattgagaaggttgttttggaaaaaaatgtatatatgtgcactctcacatgataattctctctaaattatttggaagttgagcaacacagggcctaattatacggaaccaaagtctgtaattcctaagaggaagacctcagctctctggagcagtgccactcctcatgtgattgatttcgtcttctaagacagcttttgttttcccttctttccaatgcgtgcaaaacataagccacttgactatgcagaaagatctgggtattttcttcttccactttacagtaaaatatttgactttgaaactgtgcccaagggttcatcttccggctataccaaaaaagttatttctccattatgcttggtttccaaaattccaactgaatgtgacgaaaaggaggggctctgactttcttgggctgctccaggaagtttgcctgcagaagcttcaggggctccagttctgctaccagttctgtcatttgcttaggaaggtagggcaaagacccagtcaccgtgctgatcttgtctgcaaagagatcaaacgttcacatctgtcatagttaaagagtaggtggggaccgggtatgctggctcacgcctgtaatcctagcactttgggaggccaaggcaggcggatcacccaaggtcaggagtttgagaccagcctggccaacatggcaaaaccccgtttctactaaaaatacaaaaattatctgggcgtggtggcaggcacctataatcccaactactcaggaggctgaggcaggagaatcacttgaacccgagaggcagaggttgcagtgagccagatcacagccagggcgacagagtgagattctgtctcaaaaaaaaaaaaaaaaaaaaaagaataggtgggaaagcaggagttaggaagtggctcacagttgtactttgtggtagattgtctcacactatcctctgagcaatcccatgaggcaggtggatgaggaactttagtatcattcccaatgcaagggtgagaagattgaggcccagggagacagagcgatgggcctacggtcacgcggctgtcactttgtgtcggagccgtggctggaatctaagcttttaaggtcctggttcaaggttgctcatcccacacggcctcatttcaaggggtgaattatcagtacctccactgtgaaaaaactgcaattcattctttgagatgatcatgtaaataccagtcaaaaaattcagtaaatgcatcctcaaggtctccaaaccaaaatataatttgcaaactgttttctagcacctggcacagttttcacataagatggagtcacaaggcagagcacctgggtaccggaggcccaggccaatctcttagatacatggaaggaaggaagaaagggagagagggagggagggacacagaaaggaaatacagtctttaaagaggtgcaggtgaagtgacctgggcctaaggaagagaaagcaattgcatgggtgtgatctactgggttacagtgccacagaaatacgttcaatagccgccgtgtcactcaacccaagacagttagaaggaatacagagtttaatgtaaaattggggactttcttcttatgattatacataaatataaaatggaactattgaaattgtctggattctgactgtgggaatacatttattgcgataaaacctcagctgccgttacagagattcaaattaacagaggttaaacataaaagatgtgtattgctcactcatgtaaaagtacagattggtggtgcaaggctagtacggaggcttcacaattctgggaacctgggctccttccatttattgctctgtctttctcagcgctaaacatggcttcccttggtggtcaagagggctgccccagctcctgacatcagttctgcgttccagccagcaggaaagggaaaagcaaagagggcacctcttgcctttaaggccacagcctcttggaagatgcacacagcatttcctctcacacccactggtcaaaatttggtgataaaacaagggaaactgaaaaatgtaatcttagcctggctaaagccatgtgttcagctgaaacttccgttataaattaagaagagggactgggtgcaagaggacacgtagctttctctgccatgtgtaataaccatcccacaagaccctagagcagaatccagttatacaggcaagaagaattcctattgcattatgctagggcttttgttttcaaaatgtagattagaaacacgtcttggatgatttcaacaattgaaggaagatttctcaccttgtcaagtgctactcatttgcggctaaaaactaacatctcatgctaagctagtcagagccaaatatagttagtttgatgatgcttgccaccaaaatatcaagacaaatgttcttgaagcatagcactttttctctttgccttttccccacattcagtctatttacaataaaaaagtaggttgagggatggagttgcagaaactgatccttataactgttactctatatgtcacaaaactgataaccaaatgctggagagaaaaacgtgtctgaattctgttagtatagcctgacctagcctgagcacatttaataattaattgcagtgtacagttcacgctggtttgagagtacctaccggcaagtctgattacctcattcttcaaggagctttcttgctttggttccagagctgtgacttttacttgctgcttctccaagccagaaaaactaaatttttcttttctcttttctcggtaacctctctctaagaaaattatttgccagagtagtttctaaaacatatactttaacgatgctatcacatacctttctttatacaacagagaacaggtacaccgatttttttttaaaaccagattctattttagaattattgggcaagcttgttatttaatggaatttaataatccacttgtagagagtgtgactcatttgcagggcaaaaataaatcatttacctgtttctaatttataactctgagtttccacatgacaggtctgcatagagcaaacctgcaaagaaaattaaggcacacaactgctcttatgaaggtagatcagaacattattttttttaaaggtggagattaagggaacataacctgagtgtctgactctctcactttgcaaacgagggagcagaagtccacaaaggtggaatgatgcctaaagacactcacccagttaatgaccagaatctggaatgccccagctctcccaaagaagtgcattgttttgttgcttgacattcagaacaacctcagacttctaagtggaataaacataggtgtccttgtgcacaggatatgctcaatcagtatccagccctaggtaacctgtacgccaactgtgcacctatcatggagaatgaggtggtgatcagcaaccaacaagacagcagatttaagaaaactttctcagcttctcttggcttccttgaactctcctgctttcagtagtttgtcctgtttatacaaacttgtcttttctcaagatgggtgaccttctaattttttgtaattttatacaactgatcctgaaactcttgagtactgttcagctgcattcagagcacaacgaaataatgtttatgatgctaataataataatgaaaatgatagctcatatttctgtaatcatttgttctgcgccagctatttttctaagtatattacatattttctttttttttttctttgagacagacactctgacacccaggctgaagtgcaatggcgcgatcttggcttcctacagcgcctgtctcccaggctcaagcgattctcctgcctcagcctcccgagtagctgggattataggcgcccgccaccacacccagctaatttttgtatttgtagtagagatggggttgcaccatgttggccaggctgttctggaactcctgacctcaagtggtccacctcccaaagtgtcggggttgcaggcgtgagccactgcgcccggccatacatatatgatttcattccattctcacggtgatcctatcaagtgcttactgtaacgtatttcggttttatagttgtagaaaccaaggcacagagagagaaagtaactcaccccaggtcatgcggctaataagcagaagagttgtgttgtaaacccagattgtgacttttaagccctacctgatattggctgtcacggaaaaagaattgtctatctaataactgcatatacaggagatagtgtggcagagtgaaatgtcttgggctcagaagtatcacagtctttttctactttacctcaatccagggcgcccagctaactacactcctcagtttgtggtactttatctcctttgaccacatgcggcttctacctatatgtgtaagccctgcttttaaaccacaagccaccccccatgcctatgtgtaataccgtctagcgtcttaagaaattactgaaagatacgactcaatttgaagaagcaaataatacgcgttgcacacaggatcgctattggaggatgtcggccttcctcagataatagttgccatgtttctgctacagagatatccatggctcccttagtctcctccctttgtgcaaaacaatatctcacaggaagtaacagaaaaaaattatgtccagcaatcactgcccttttcttctggcattttgacagtggcagggttatgccctataatcaaaggaaacacagagcggccatctcctagcaactccctgaaggtcgctcccggggaatcactgctgtggctgggtgtgggtgcacttcacttccaggtttgaagacagcggcgctcccacgccagccacgagctcttctcagtatacttccaatacagtgaacctgtggtgggtagtgttgcaggaagaatgagcactaaagtgtcctaagctcggacagttttatggaaaatacatggaaaagctttatcatcttcttggttgtggttaaaaatctaattgcaattaaatgtcactagtaatcaaaatcatcttgctactctgccgtttccctttgccaaagtctgtttcccacttcttttctgtaaagggacatctgtcatgcaggggtggaccgctcacagcatcctccctccactgatgtttcctccccgtgggcctctgacccgcctgcgcagtctggtgtgctggtgagaccagtcaggcagaactggctcccactcaatccagggagctgctgctcctggagcctaaagcaccagcggaaggtgcaatgaacacagattttactccaccatctgtggagtaaagaagcaaatgtgagcccagaagaattcatccttcaaaccaagatttagtagacgcccttaaaaaaaactcatttatacaagagaaaacctgattcgtgaattcatttgaatgagggaccaaggcaagaaggggccccgtatctgaaatatttcaaccgctagtcacacctgtcggtgccaaggcaacatcccctgtttaatagcagcaggagtcacatttttggcagtacctgccagactcacttctaagtgcttcgtgtatacgcatccactgggtccttcagccaccccaggaggttggcaccgttgttatccctgtttctagaggaggaaatgtgggcaggttcagagagaggataagtcactttctgaagtgatccatctggatatggtagaatgggcttttcacaaagctggcttggctccagcatctacactcttgactacctcgccagcctgccccagcagcaggtgttacgggagaccacgcccatctctgtctgggagttgagcagcaggtgatgccacagttcttaaaagtagcccataatcaggatcataagccttcgttatgaaatactttttctatgaaatcctctgatgatataggaactgtctatttctatttattagaagaggaagaggactactttctcttaggtctctgactgtgtggcttgccatagaaaaagatgttacttctaatctctctccagcagtcacattgtaggacatggcacagtgggcatgactgttaagaatagccttcctttcagaatattctgttacacattccagcaacatttattaagcacttaagatttattatttatctattgagcatttagtagttttcactctttttttatgacctctgtctttaagccacttgtagtcgagggaggaaaacatggatggagctgtcactcctgcatatttctaaaggatttagattctgtctacatttttggtctgttgtatttcaagttgttgagttccagaaatgttctactcgctacataaagtactttttaatctatttctatcaaaaacaattttgaaatataatggagtgtcttttaatcctggtaagttagggcttagggaaaaatagagttaactttaccagtttttttctgattttaaattttcagtctcatgtttctttagtcttaattattctaggttaaattatttctttttattttttaaactaaatatttattttattttttatttcgtgtctgttcctttggccttttcatagggcttttctcaactttactatctccttggggtacaggagtggtgtttcttggagagaaaagctataaattgctggagactaaattaatatcaaaatagaaggaattttgttacatcatctctttttcgccttattgcctggcataatcccattttatgcctgttacatcagcataaatactgataacttctacttttagtcttaacatcactctttcagtttaggcaacttatttagtcatgctatccaaaagcagaataaagctaatgattaagtaaatttattctttgcaaacaaattcatggagattaatgagaaaatgttgatatttttaaaaaatctgtcgtgaaaaatgccatggtaaagtggtcttctttttaatgatttacaagcctttaacttataacccaaaacacagttgcttatttctttatagactcatgtgttctgaagataagtgaaacttttaaatgatttgagaggtttaggtagcatgcctgttgatatggtttggctctgtggccccacccaaatctcaccttgaattgtaataatccccatgtgtcaagggtggggccaggtggagataattggatcatgggggtggtttccctcaagctgttctcgtggtagtgaatacatctacgagatctgacggttttataaaggagagttcccctgcacatgctctcttgtctgccaccatggaagacatgactttgctcctcctttgccttctgccatgacggtgaggcctccccagccatgtggagctgtgagtccattaaacctctttcctttataaattacccagtctcaggtatgtctttattagcagtgcgagaacagattaatacacctgtatacctaattgctgttgtgaaacacatttctgcacaaattttaggttataggttttctgtgttgatgaggtgaaaaaaaaaagcctaaactaaatttaagtgaagttatataaacattacatctgccattattctacttaatgccacctaagtgtatccatgaaactcagtatataaacctggtatagaccaagtgtagggtcagaggctggctgagggagcaatgggatgacgtgaagctgaaagcaagacactgctgcaaaatatcctacactctagcctgctgactcctcccattatttgagatactcctttagaaagaatggaagaaaatctgttaaaatgcaaatgtattattttgataaagcaatgcctcatcattcataattttaacaaaacccaaggaaattaaatgtaagatagaaaatcaaccatatatccacttaaataatgaaggttatgttatcaccaggaaagtaattttttcattatacttaaggataggtgggtagctgttccatcccatttctagaattgaagtttaagatcctgtgtagtggtggtgattccatatttcacagaattgcctcagcactgtttgaaatcaatgctaatggtcagagtccaaagtcagattgtgatgtttgtctagtttcacacaaaacgacaaaggcaaataatggtgtgcagtatgaacatatggcaatattaatgtgtaccaggctgcaatatcatgacagtgggaaactaaatgatagtaatgattaaattatagtaatgattacagattctactcactaaattataaagcaccgatttgtttcactctgactttctcttgcacccttttccacagcagcaatatttctgcatttgcctaagtggtgaagctgactacctctttgcatttgctaaaggaaaaaagtatatattgttttcagcaacttgtaatactcatcccttcccctaactaccctgtgtagagccacacgatgccagtacgtggactgaacgtccttataggttccaccccatgattaaatttcctgcctctgaatcacgttctcctgatgaaagtctctgctcttctgagctaatccttgtggtgggaaagagataaaaagcaaacacgtaagatgagaggtgataagaagtgttctgcagaaaaacttttaaaagacaaaggaaacatggaggactgcattttatatggggcagttaggaaaggtctctgatacagaggtgctggagcataaatctgaagaactcaaggagagacctggggctccagggagaggacagtgtgggcttggagtgtccaaggcttaacgaggtagccagcctcattagaggctggaggacaaagaggaagagtggtagccatgagctagaggtgcagtgagggcccaggacacagaggatgctgccggccagcaaaggaggggagatgggaggtgactggagggctttgaataggagaatgcctgatgtctctcagatgtttgagcatcactctggatactttgggaacagtggaacgcaggtgatgtcaatggaggaagggagaaaaaccataaggttactggaaagctagactaaggtgttaggtggtaaacagaaggtggtgatgagaggtgtgcaggttctggagagattttaaagagacagtagcgatgcaggatattcccctgaccccttcacggcacttgcgaggggggtgcctcatttactcagcctgcccctctcaactcctcacaggagggagtgcaccagcaagcagagtggaagctggcgtgcatgagcgctggaacccgctggccgctttggcactggcaggagcgaactccatgcagtccccgttcgagcatccaggtgggggtgcctgtgactcccaaagccccagagggcgtgttgcagtgctgttctagctctgctgtccacgggcggcttaagtgttaacagcttagtgggccctctgccttttcgcatgaggcagctacccccgccagcgagggcaaaggccagtgtgacagccttttatatttgcactggtggcttctgagctcttgcctggcatccaggaaaaatgaggttgcacaaacaaattgaaggatgataaatgtgggggattttattgccgataaagtggctctcagtgggaaggggagctgaacaggggatgggcaggtaggtagtcttccccttgaatccagctgtctctggctggattcttctccgaagttacgccgtcaagctgtccctccaaagtcaagctgcttctctctgacattcatctgtagtcccacctaccagctaagtctggggtttttatgggcacaggatggggtggggcatggttataggtagtttaggaaaggcaacattttagcgggtaaagagggatacaagttctcactttgggccatggtttcaggcttttcagcttgagggtggggttttgctggggaatcacccttttctgcctagaatttctctggcttctgttcatatcagtaggatctgctccaacatgaggatagtaggaggagttatgagtcaaatatgatgtcagtgttttggggctggacaagcaaaatggtgatgctcttgatagaaaaatgaaactccatcagtggagaggataggtggcggggagcacggtcagctgagtgtggtgttgggcagcttgtgcgtgtgctgaataggtgctgatataccaagtctggccttttaaagacagacccgggcttcagaagtacatttctgaatcttcaaatagctctacatgaggttaaacagcccctcattcaaacacatttggacattcctctacgattgcctcaaatattattgcctaaaccccaacatatgttgggaatttggatggggaaggatgtagaacagattgctttgagacagaaaataatgcaaaaagatgaagggaagtgaatacacagtaaaaatatgttagacaccaaagattagcttcacttacactgcagtttttgtgggcactttgacacttagaactcacctggctgttgctgtacagcaagagaccatgtgaactgaagcattggttagacctatacatttctacaaaccgctctagccctagttgaacttgggaaaataaatatctgtatgaaaaagttgtctagatctgttacacaattactatcttgtttaattgtagaatgcatgaaattggttgtaaaatggcctggttaagagtctcatgtcagggccaggcatagtggctcatgcctgtcatcccagcactttgagaggctgagatgggaggatgagatgggagaggctgagatgggaggccaggagttcaagaccagcccaggcaacaaggcaagaccccagctctacaaaaaaaaaatgaaaagatttgctgagtgtgatggtgtatatctgtactcccagctactcaagaggctgaggtgggagggtcccttgaatccaggcagtcaaggctgcagtgagccataatcacaccacggcactccagcctgggcaatggagagagaccctgtctctaaaaaaaataaaaaataaaataaagttatcccaaattaattaataggatccttgttccgttttgcacacgatttatttgcagtttcctgacagggatgtgactcagtttgcatctgggagagcacatcggtgtttaccgggtttccctaagctcatcaggcagcaccacctctccacgggcactgtgcccgctcacctcccacgctgcatgagcaacaggctggccagtgcccaccgttaccatcagcagccacgacgaatccatcactcaagttctgaaactgatgagacgggagctccctccttcagcacaaaagccactgcatagctcacacagagaacaaaggcaaaaaccaaaaccccttcagtactagaatctaatgaccataacacaaacagtcagcatgtaggaaagaaaaaacttgagtggtaaatataggagaaaacacattcattccatcttcaaaatttgggggggagtgtggatctaatataaatcctaagaactcagacacagtcgattgagaacagagcaattcccttttccctcgttttaaagaatcatgtacataaaaggtttgaacactttgaactttgaataagtttgaacacttcatgccttttggccactagcatgctgttattttatgtcgcaagacgagcaacaatgaggcatccacagctcccaggcgtcaagactgaaggacactctgcctctcccttagggtttgagatctctgagtcagggaacactgagtgaaagcaaagctgaaatattactggggatcttcagtcttggggaaaagagttataggtgttggattaacatcgagtgaaagcaagctgaaatattactggggatcttcaaccttgggaaaaagagttataggtgttggattaacaacattcggaggcctggttcccttcattttacagatgaggaaaccgaggccaaaaacttcaagtgactttgtccctctccttaacatacttaccaatgtagccagaaaggcaatgcaggctggtccacagagtgagtcaccttagtcaattacagctgaactccttgttccactctttcttccttctcactactgcacttgactagtcttaaaaaaaaaaaaggcaatgcatataaaaagttaaattaaatggcagtaatatcagaaatgttgcaagacagcctagattcaatgtcagatgaagggcacatgcagtgagcctacagtaatgcagagatgtgggtgacggggcaggtgaggagatgggaggatcttgaactcaacttcaaaaagcaaatgagtggagtttgctaacagaggacaggatctacagatggccacaggcattaaagggaagtttgtgttagggaagggtaggttaatttttctgccttatcataggaatatattgttttaaatgtaggggtagacatgtatgctataatttatatgtctttttcatttcattttaaaagtaacaaaaacacatttaaaaagtaacaacatgtattaccaacacttggaaaattggcagagaaagtcaccaataattattcctaccctaataaaaaagattagtctttgtatgaaacctgccatttagtgtcaacaaaatgtaagtttctttatttctttattgtaactttagtttccttttactaaaaaaaaaaaaaaaaaaaagatttggccagcacagcggctcatgcctataatcccagcactttgggaggccaaggcgggagttcaagaccagcctggccaatatggcaaaaccccatctctactaaaaaatacaaaagttagctgggtgtggtggtgcatgcctgtaatcccagctacctgggaggttgaggcagggagaatcgcttgaacccgagaggcggaggttgcagtgagcagagatcccgccactgcactccagcctgggcaacagagcgagactccgtctcaaaaaaagagaaaaggttgaagagttctctggttcacaagaactgaattgaaattttttgagggacacatacagtcatacccacgtagaaatagatataaagattggagatccagaaataatattctaatgcagattttaaaagatagtagtagattataaaagtcatgataaaaataacatgaaactctctagaaaacactttatttggatcttggaaaggcgctccacgtttcagagccaccttttgtgggccttttcccccttgccttaatgatttgaaggttatcaaaaccacatgtttcttccccctttcctttttgattagcatgaccaagaaagcactgggaaggggtaaaatggaggcaggcatcacggagggcggaaagaagggctaagataattccaggaaaaactaaaaatagctcattagccttatgccaaatgtatatgaagtcatttactttttataaggttcatccagctgaataaagtgatttcatttttgaatgctcctgtgattataactaaaaggtgactcatccaatctgatggctcataattcctcttgagactaaacattcagaatcagcatgaacaaaaaattaatgaagacacaaagggtggttctgatgatggtttgatccttgcaaagttaaacaaacgctggttgtgctccctgtctttatctattacatgtacctgtgacaatatagtttcttgaccacatttatttatcgtgagttattatgtagtgacagatattaacttaaggaatgacatgcttaatatgtttgccacaattccatacattgatgaggatgctgcttttctgactaaggagaatttttgttcatctaagaacatctcccctggagagtgagagcccaagtcggctctgccttaaattcatgatctgattttatgagggtcacccagaacccactgtgcccttaacactgaagcctaggagaagcctgggctccttcaaggggaagaaagatgggcctgaccatcctatggtgggtgataacaataaagtgctcagggatgtttgtgagaaacacagagaaatactgataaggtttggctgtgtccccacccaaatctcatcttgaattgtagctcccataatcccacgtgtcatgggagggatccggtgggaggtaagtgactcatggggtgcgtctttctcgtgctgttcttgtggtagtgaataagtctcatgagatctgatggttttataaatgggaattcccctgcacaagctctcttgcctgctgtcatgtaagatgccctttgccttctgccatgattgtgaggcctccccagccatgtggaactgtgagtcaattaaatctctttcctttataaattacccagtcttgggtatgtctttattaggaacatgagaacaaacaaatacaactaccaccacggaattgtgagaacaagcatcaaaagcagcagctgtcctattgaaataaatttatgtgccttgtacccatgataaaaaaaaaaaacaaagatgtttatgacatttgtcttagagtaattatagtatacatgagcatttccaatattgctcattacagggtgtactgtacctgattaatcctgattatgacagactcacactcaaattctggtcaataactaagttatgtgttataaactgttgcaatcctttatgtccttagatccaagaaagacattatagtacaaaaactctgaagccaaactgcctgcattcccaagcttcactcactacttaatagctgtgtgaccttgtaccttccctgtggtttggcgtttctttgcagtaaaataagataacaatagtatttagcttgtttggttgttgtgaggcctcaggtcaattaatatatgtgtaatatgtaatatatatgtaacacatatgtaattaatatacatgtaatatctgtaaatattcttagatcagtttttggcacatagaaaatactttttaagtaggagctatatcatttaaattatctgccaagcagttaattcacaagaaaagcattaagaaacatgtacatacgtgtttatgacagaactctccaatatagcaaaaatctagaagcaacccaaatgcccctgaacaggaagtggatgtacaaaatgtggtattttgacaaaattaaatattatataggagaccaagtgaacacactacagggataaccaacaatatagatgaatcttagcaatgtaattatatgcagcattatatcattataaagattaaaacaactaaaataaatgtgcttttagaagacatataaatacaatgaaattatatgaacaggaaaggaagagaatgataagcatggaattcagaatgatggctactcaaatgcatggagctgagggatgttataacagcagaagtcatctggatagacacaggtccttacgaaggtctatctttggctttagatggttggtgtgtagatgtttagtgacagaaggaaggaaaggagggagggggatgtacatgaccttgtcatgcaccaaggattgtggtttatccatttgtgtatacttgagacacaacccccaaagtaacaataatcattctccattgctacaatcaatatcacttatgttatattacaactaactaaaagagaaaagagtcaagggtttgtttgcttgctgtttgtggatctgattttggttgggatatgaagtggtaagatatatacaaacagcccatgtactgagaatttttctaaaatgaatatttgtattagtcttctcttggaaaaacaaaaatcacaagtcacattcatgtttagggttcaatagtaaaaatgcttttgtttaaaatgtatgatataatttggtgatttagaattgattgattaaatcaacgtggcaagcataatattttcatgatactgttggtattcaggaaacctaaataacttcttaaaatacacttcagactcaaacaaaatcatcctgccaattgccaaaatatcagctcaattatctttgccattttccagggattttcaggaatgagtgtggatttgttagcctgacacctctaaatcatctagagattcctcaagtgacatatgctggaagacaatgtaaactggtgtctagggacaccattacattcaagatgtccaatagcaactcagaagaaaggccctcaatagactagaagagccaaggggtggactgtaatggcaaatgaggggaatcctcaagcccctttgtctaactctccctgacaaaccacttcacgatgggagtcattccatcatgtctgtaaatgaggacatcttctttctataaatattcactgggtaaataatatgtaccagatattgttagaggctgagtgtatagcagtgaaaaaacggaaaacccccattcatgtttgcatatagaacatatcaatattaaactttaaggaatttttttttatttttgattttatatatattttttgagatggagtcttgctctgtcgccaggctggagtacagtggcgcgaccttggctcactgcaacttccactttctcggttcaagcgattctcctgcctcagcctcccaagtagctgggactacaggtgcgcaccaccacacccagctaatttttgtatttttagtagagacggggtttcaccatgttggccaggatggtcttgatctctaagaaatttttttaacgaacaggtccagtgtttacataatccatctgaaaaaatgtactcctaaaatgtttttgataaaacaaagagaggattggaaaataaaatctggacaaaagtgatattatgattcctttgaggctttaatatcgaccaacttctgggtagtcctgtactgaactaggaagataaaatccacaaactcgtggcctttgagacaactgggtggggaacacaacagcatgtgtacgtgtgcctgtgcatgggcacatgtgtttgtgtatgtgcacatgtgcatgcacacactgctttttctctcacgtttatctgccatgctgcccctacctgtgtgacactggaacatcatcatccatttcggatccattgctgttatgggaaagtgaagcaacagtataactcctgcaccgcatgagctggtcagagactcccatctgcccactctgtgttaacctgtgcctaacctatatctgacctgtgcaaaatcaaaaggactagaaatgcttatctttcatgcccaagtctcttgggcaaatgaactgtgggactgagatagaagcatgctgcccttcccagagctgaatgtttcttgtcttatttctcaaaacatggagagttgagggagagggaacatccagggtaatttgtggagtagaatgggctctcaaactttttgattaatgaattgaataatgaatgaatgggccaggtgcggtggctcacgcctgtaatcccagcactttgggaggccgaggggggtggatcacctgaggtcaggaactcgagactagcctagccaacatggtgaaaccccatctctactaaaagtgcaaaaattagccaggtgtgatggtgcatgcctgcgatcccagctgctcaggaggctgaggcaggagaagagcttgaacctgggaggcagaggttgcagtgagccgagatcacgccactgcactccagcctgggcgacagagtgagactctgtttcaaaaaaataaataaataaaattgtaaaaaataatgaatgaatgatagcattctctgaggtgaggaatactggaaaaatggggtgaggtttggggagaagcgaatatcctgactccaacatgaaatgggaaataaatatgaattatgtctgaatcgtaacttagacataccaatttagaaattgaggtaattcagtgagagtctaggctgtctttacttttgataatattaaaagctagattcttaagcaaagtgctagcatacttatactacacaaaataaacctttttagaagcattcattccatatgaattgatgttagaagtacaaatcattcttatgtattcattaaactaggaccctggaggatttattttaggtgttattgccttgacctagagttaatctgtatttttgaaggaaaatacgttgccttttttcacaagcactttataactcacttctccctaattcagattgcttttcttaatcatttgaagttaatgatacaattatcacatagtagccttacaaatagccataatattaaatcataatttatgtaaagtaaacatccaaattccaaaacatctgaacatgggaacaggctgattgaagtttttgtgggtcataggaccttggcaattgtttgtgagcctgatgccgacatttctcaacagtaatcaaagcacagaacaacaaccatccacatgaaaaataactcaaattgtcattgtacttcccatgctattgtcatttagcaagttatggcatgactgattcagccagtaagaaaaatgtgatgagaatattggctaggagtacagtctgcttagatcttttagttttttttccttcaaaagccaatagacttttactctttaaaataggagctatgcaaaaacgtaatatttggaatgccaagctgcctccatgattgagatacctgttttgaagttctcctctactgtaaattctaacagaataaaaaaagaatcaatgattcttgttacctccaatgtacctaccacactactcatgaaaaaagctttaaaaattaatgaaaattgatggactgaagttctgtctgtttcttctggtgcagatttataaaatggattctattttaggaacgatcaaattctaaaattgagaagctcaagggtagggcactggagataatatagaaagacatgtaatatataaacaattctctagatcttatatctggagttaagtaaagcagacaacaaagagggagacagcttggttgtcaggatggtggcttggacatgtgttaatatgtaccccatctcatcatgatgctatcagaagcacgggtctttaaccatctcctttttctgaattttaatatgtgaatgagtcattaaatattggcttccagttagtttctgcttgatatgtacaatcatgacagtagcatagtggtttgcacattaaaggtcaacaaatgtttgttggttgaatatacctttcctagatttagcaaaatttcaaaccataaaagtcccttatgtgcttttatattttaaatcaagtctttcatgttataaactttaaaactcaggctcatcgaagtgaagtgatttgcccaagcataccttcccacacaaggcttaacaccgactcccactttagtacaataaaaaaaaaaaaagtcatgtaacattaagagcacatacctggaagtcccctaaaacataggttgttgaactctgactctgccacttcctcgctattgatgtgtgctatggtctggatatttgattcctccaaatctcatgttgaaattcgatccccaattggagatggggcttaatgggaggtgtttgagtcttgggaccagatacttcatgaatagattagtgtcctccctggcagagggagagtgagtgagttcttgctctattcattcctgggggagctcccttgagagctgattgttgaaaagagcctggcaccttcctgctctctcttgcttctgctctcgccatgggatctctgcacgccggctccctttaaccttctcccctccaccaggagtggaagcatcatgaggcctctctaaaacccaagcaaatgtcagtgccatgcgtcccgtgcaggctgcagaaccgagagccaaataaccctcttttctgtatagattacccagcctcaggtattcctttatagcaacacattgacttagacaaggtatgtagatatatacttctaaagtggcttctcccacaaaaaagaaatttgcggcccagcacagtggctcacacctgtaatcctagcactttgggaggccgaggtgggtggatcaggaggtcaggagatctagaccatcctggccaacatggtgaaaccccgtctctactaaaatacaaaaaattagctgggcgtgctggcacgtgcctgtagtcccagctactcaggaggctgaggcaggggaatcacttgaacctgggagacagaggttgcagtgagctgagatcacgccacttgcactccagcctggcaacagagcaagactccgtctaaaaaaaaaaaaaagaaagaaatttgctaactttttggcccatccattattgtttgccctctcccaatatgagtgacattttcttaccctctgctctgtgttaggaatggcagacagccaacatcccaataataatagttcatgttaacattttctatgtactatagaaaagcgatcactccactcaaacataattaactagaatcaatgtaaatgcatgtggtcccagcgtgggttctggatttcctttaccaaatgctgcagcacagatgacaaagtgcttttacgctccattataaaagaagaaatggaaatgaagtcagtaggtatcagatcagaagtcagtgggtatctctgtccatgaagatgtccacacagacattctctacctgtggacctgaaggagaacaggctgagtcccagggtagagtcgatgcgaacaagaggcccaggttggatctgtaaggtgatccatggccctgagcatcatggcagactaccctggagctaaaaccaggctgccctgaaagagttcgtgtagttgggaagtcaaaaggaaatttttctgcttttccaagagtggcaaaagtccaagataaaagaaagagtgttgagagtttatttctgtagataaaagggggagaaatggctaataaagatcagactgagtaggatttcactacatatgttaaaatatgccaactaacaatctcaaaaagtgttctgatcatttctacctttagccagtacgtcaaataagttagagtattatgaaacaacaaaaactttgttcaaataagcttcactgttctccactgtgtaactgtggaatataaatttgtatttgtatgttgtttttcttgcctatttttggtggattgagtgaaagttttagctttaaatagtggcagagcatgaaggactatattaggtatgaaaaatgaagaatgctgggaacatatgtggggggtaagaactagaagtgaggtcatctgagttggcattttgctgaacaaaagggcaatagacaccacatcccattttgttgtacagttctgaagtcttaaaccccttatttctaggatggacttgttttcattctttctgatgacaattgtgaaccagatggttaaaaacccagcactgagaaacagtcttatttagatattatgtttcttaaattcaggtacatcttgagggaatattgaagcttctagctgcaactgttatttatacatcttcttgtcaatttaaagcataaatttggtatatttaagagcattaaccctaagggccactgggatgagttccacgagatgaaagaaaaaaataaacctcaagtacatgtcagtaacttttcctgttgctgctggtagtcacctggaaactcaccatagtgtctctaccatatcgttctgtgaccctccccccacccagcacagcctccaaagcctgcctagagactcaagttcatgccagcctgactcacgcacagactcatgtggacactttaaaagtgaggcagctggagcccaatcttccttgattcatgaaaccactgttcatttagacattgatttaattatatttttcaacaattgcattaaagcccttagacttattccatataaatttttgaaaagccagtctcttcaacctaatcatgaaatttagtttagccaaatttaattcagcctgtcaagatcatctttctacttattacctattcccctctcgtgtgtatgccttctgcagaatcaataaacacaccactttgtttttccctaaaataaaaatgttgcagacacagtcggaacagggtactcctcaaattgagtaccttttattcacctatgattctgcttaacacttgtacatttagtacatagagaaatgtaaagaattttttcaaatgtctgaataacaatggagcagcagtatataaatattaataatacatttctgaataatacatttccattaaaatggaagatatctgtctttattgtctacttttattagatcccaaagaataatgtaataaactatccactgttcaacacaaatatcaaaagtttccaacttttaatgcattcaaaatttcttcagatgatatttttcctccattggcttattattttctcgttcaaattttctaaaatgaatcaaactgccttaagatgtacaatttaagatacattctggccaggcatggaggctcacacccataatcccagcactttgggagaccaaggcgggcagattacctgaggtcaagagttcgagaccagtgtggccaacatggtgaaaccccatttctactaaaaatactacaattagcctggcatgatggcacacaccggtaaccccagctactctgcaggatgaggcaggagaattgctcgaacctgggaggtggaggctgcggtgagccgagattgcaccactgcactccaccctggccaacagagcgagactctgtctcaaaaaaaaaaaaaaaaaaaaggtacatttcattctggataaactttgtaagtaatgtattacttaaattttaagactataagatcaaattagagcaaattttcccctgccccaaaatttaaattccacatagcaagtgggatttcaccattgcatatctgagacacatataaacatgaatttgtaataattctgacagtatattctgtcaaaaattctgacaaaccttgacattgctaaagtatataaatgttatttcaggtgctcaggaaacaggtgtattcaatcagaagaaaagtgtggctttttaagaacagtgaattaacaataagcaggcttatttcactgtaatactttcaccacgtaacattaccatgaaaataatttaaaatagatatacttactaactgaaaattctaaggatttcagaaaaaaaaaatcaatggctattggtctaggcttagaccaaggaggtctaatatgctttgggtttagtagacctgattaacactttccatttggacttgtgctgtgattgggcaaaaggaatccttgtcataatcaaccactgttttcctattagtcttagaggaagaaacatatggttctatgttaacagttcttattttatttatcaaacagttttgccttctaccacaccgtcttctcatattttgttcttttccctaacccctgcctcatatgattcagtacttaattaagcagggtactgtaatattttaaagggaaagagcttgatttcctatgttgtttttctgttttgtgttttgttttgttttgtttcatttttttgagatggagtcttgctctgtcacccaggctggagtgcaatggtgcgatctcggctcactgcaaccttcgactcactgcaacctccacctcccagcttcaagccattctcctgcctcagcctcccacgtagctgggactacaggcatgtgccaccatgcccggctaatttttgaattttagtagaggcaggggtttcgtcatgttggccaggctggtctcgaactcctgacctcaagtgaccctcctgcctcggcctcccaaagtgctgggattacaggcgtgagccactgcgcctggccaagatcttgatttcaaatgacgttttaagattccttaaaggaggatgcctattatttgctaggagtcaggagagatgaactacttttgagtatctgcttggggcatccatttatcttatcctcaaatgtctaaccctaaaaatgagttggttgatctcaatccctaccagagcctttgatgcttgcttctacttaaagtctaagtatgagacatgcaaaactagactagattacataattcttttgatatcagatgatttttatatttcaatatataaaaattaaaacggaagattttaaaattaaaagcagtgagaaacttagcaaagcataaaattttaaaaaatggttctttaaaaagatcaaggcttttctcctcaaaatagaaatgtgtgcttctcagtacaaggtgggaaatcagaggcactttcccttattgaattaagcaggagtaggctgccatcaggatgttatcactctgcaatttgtcacacaatttgttatgtgacattttatagacatctctttccattcagccatcgctttcggctatcagctgtcaaagggaaagagaatgatttttttaaaaaagctaatcgtcaaaacctttatagtgtcactttcccttagatccagtagcattgtctatagctgggctagaaggcaagggtttgattcaactattttcttaggttttctcttgttcatggcaatgtgtgggggggaaaatcttagctaaataaaggatctttttaaggaagaaagaaagctgcctggaaagtagaattccttttcaattccaacatgttgctaagctgggtgtgggacaattgggagacgggaaaatccatagaaatcagtctaataaaccatatggcttgcttcaatctaaagcaatacaataatgccccatgtattttcaggaaagtctagattatcttcttaagactcaatcaaaggtaaagatctgcttcaaaatatttgaaatattagtgaatgggaataatgccagtttgccagattggggatgctttgctgtctagcgggggagtcgatgataatgacattggtataaattgttcggatgcatagaaatgggcagaactgggatttgagtcaagctttgcctatttcttgacccattcttccaacgctattcagtttgcctatacatgtgttatagggatattctaattaattcctcacatgtctctttgataaggtgcctgacttatgagatcctcagtcagaatctgaattattttcattagaaatttttttggcttttgatttgcacattataagccaatggaattctcctaatactgtactatcaagttgaacaaatgacttagtcttagaaaaaagatgcacttgaaaatacttagatgttgttccgtaatgatccctaagattacaatataaaactaaggaactccatgaaagtagggtggctaggcacagtgactcacacctgtaatcctagcactttgggaggccgaggcgggtggatcacttgaggtcaggagttcgagaccagcctggccaacatggtgaaaccctgtctctactaaaaatacggcatggtggtgcatgcctgtaatcccagctactcgggaggctgaggcaggagaatcacttgaccccgggaggcagaggttgcagtgggcaagatcgcatcattgcactccagcctgggcaacagagtgagattccacctaaagaaaaaaaagaaagtaaggtgctggaccaatgttaagtcacatgaccatttaaagcaaatagtgaaatgagtgattcaccaactttgagaccttggaataacatcagaaggaatcatttaccaggtgatcaacttctaatcagtaaagtctttagggaaaattgataagtattttgaacagcttacattgtaaagtctcaaaaggaaaattgctagtttccttggaagacatatagtgctcttttttcaggaaatttttccaaatatcaggacatttggtctaattaaaactaacactccgcgtattctcataaaaaattatcaacggcctcatgttcatttatttctttattatttgtggtaataatgtctccttattcctagaaatgatgttgaatgtgttctggcctcagcatagataaatagatgccgcgggtaattcggctcctgaataataaggaacattttcaggcactgttagcacaggagttctgggaggtacttggtgttcttatgagcatggacagtcatgccgctactgttgacttgtgtgccacccactcaggcagaggagtctctgagccaatttagagaaactagtcagaagagagtttctaaactcacaaaacaaactacttggagttttcatgtgactatttcaaagcagcatgttgacatataggaaagataggtgaagataaatgtcaacctgaattaagtcatttgactataatagaaaagtgaaatcacttggcatttatgaatacttcttattttaccacagtcagagatagagagagatgcattaatacattgatcacttagggcagtttatccaaagagagtgctacaaatgatcccatttcaaaataaataagtaaattcaagttaaaatctggtgcataaccttaatatgattgtatttttatgttcatgtttaaaatacatctctttaaaaaaaaaaactaacatcctgcaatgttttcctactacttaaacatcaatatgtccttttttgaataatatatgaactgtgaatatgttaatttcaaaataacagtagcaatgtattggcttaaggttcgtctgtggaaaatcttttgggcaactcctcccattaactgagctaaaattcagtcctgtagtttcatacatggtcttggtgcttaaattcaggtctacaaaaataaaatgacctacatagaattcttagccaaaactggggaaaggattttgtctctgctgctcttcagaatgggatgcctgataatcaaaacaattcaagcagaattatgagacaacaggcacaaaggcatgttcatgcccatgcaggatcaaactccttaggatcctctttcaaaagttaaattacccattctattctcttatacgtattgagaacacagcctgctctgattccgagaaaaatgagatgtctgataatccaaagaaattcaagcagaattggccaggcgtggtggctcacatctgtaatcccagcactttgggaggctgaggcgggaggatcacaaggtcaggagtttgagaccagcctgaccaacatggtaaaaccccgtctctactaaaaatacaaaaattagccaggcgtgatggtgcacgcctgtaattccagctactcagaaggctgaggcaggagaatcctttgaacccaggaggtggaggttgtagtgagccgagatcatgccactgccctctagcctgggcggcagagtgagactccgtctcaaaaaaaagaaaagaaaagaaagaaaaggaaaaagaaaaagaaaaaaaagaaattcaagcaaaattaaaagactatagacccgaagtcatgctgtttacagcccttccatgaacaatcaacacaatctattgccatatgtattttgacagtggaggctactctaatccataagtaaaaccaatccattgttgtcacaaattaggacacatatgaagttgctttttatatgaaactttgacaaaagtaaacacaatcccctagcacctattgaaaatcatgctgacaccttcatgttcggagacttctttgctccgtggattgtctgctaaggctcaaggtagtctccatgttatggtcagttctcatagtctcgtccctggttcaattccaagttaagagaatacttgagatgctgttgtctagcagcatgcaaagactctaggaatttgatgctttccagaataatctgtgcttgttatgtaagtacaatcaaggacactttttcagagcagaacaaaagagattagattcgctttagtttgaactgtctaaagagagttctcagtcgtggatttgttaatggacttagcacaaataagggaaatagaatcgtgcatttttattagtcacccaagaagcctttcggtttcaggttcttcttgagagctcaatcactgggattcttcttttaacgacttggaaaatgtcttgcttgattaggaagttagtcatttcacattttgacatctaaaacaatgggaagttaaaaagcctcacaaattacatttataagtaacaggatacatcactttaaagatgaaaacctcaaggatttgtggcgcctttctttgttctcgttaatcctattttactttttgagtgttagatattctgtaaatatcggcatttgaattcaaacaataggtgttgataactagttctctaacttggtacaaaaacattattattgtctgtcagcagattttgtattctgagagttaaccttctgtatttgatgttttctttgtcaatcactattattctagcccgaatactgtcttcctcattccgttttaaaaccttaagcagttgtaagcacagcgttgcctggtttcaaaaggaatgaagaagtcgaatttgggaaaggtcctcataatcctcattttctggaggttgtttatcccttcttgttttagaagttgcctcagtctcagtcacagacatcccctgaggcttttcttttccatttattttgtccatttaaggttaacatattaggagttttgctaccaagagctaccgagagattaaactaaatacgtttgaaggagctttcccaaagctcctgtgctggccgctgccctcttccctgacttcatcggtatccctcaatacaggcggtcttaaggctaccaagctgagtttttagaaatacgccacattttttctgtgtaattctggagaagaacaaaacaaaaaagtaaaacagaaatgtgcctgtttagttgcatacactgaaaaataggagataaaattcaccatcataaaatttccctcaatcatttttcagagtctgttggcctatgaaatgccccagtgaagttccccataaccctgtggaaactcagttctagcctggccacgctaagcatggctcctgccctgctccctacactgcaatgatgcccagggcagacggacaacgatatgacactgaacacagaccacacaaaaattaaacaccatatagtaaggatatcgtctatattgttttcagcgtagagctctaaaaacatatactgaggtgattatcagtactgtgattttacctattttaaatgttcattaatttagcatttattgagtcctaaggtattagtaattcaatctaggcaaatatacgtgtgtgtgtgtatgtgtgcacatatacatgtgtatatagcaaaacgaggattacactatacatatatatctatatataaaatcttgctttataattatatttcataggacttaagtgtatttttaatgttattttctttcatcattttccccccactgggagagaagtaccattatatttagctaatattcacattttgattttattattataatttttcatcagtaatgaacaaagccaggctttccaaaagaggtgaactccaatagccacattgaaagaaaataatagttgtgagttgagcagaggaaatggtcagaagggagaagagggtgagaaccttggcagacaaaggcaagaaagccaggaagctcatttgctgctctttttagagactaaaaaatctttatttatcaaaagtctttcttgacaggtgatcatgccaatgatttcatttcaaatttatcctcattcatccaaaaggaataaataaaattcttgaaaatgttcggatgttgcagtactgatgcgcctggaagctgtgagtgtgttgtgctgtgcgggggggttcttgtggatactcaacaacaggcccactcaggagcaaaggccaagtggccggggtcagacagctcttgcagggagctcttggacttaggagatttgctaccttatcagcgtgtctttcctctttggtttcagggtatgggtaaataagaaactccataaatgggctaagagaatatgccagagaaagaactaagtcatctcacatgtcataaaacgatacacaatatttaaaacctttttctttgggaggccgaggcgggcggatcacaaggtcaggagatcgtagccatcctggctaacatggtgaaaccctgtctctactaaaaatgcaaaaagaaattatccgagcgtggtggcgggtgcctgtagtcccagctacttgggaggctgaggcagaagaatggcgtgagcccgggaggcagagcttgcagtgagccgagatcgcaccactgcactccagcctgggcgacagagcgagactcatctcaaaaaaaaaaacttttttctgagacaacccctttctgccaaccgtttctagcgaattaatctcaattgctttgcatccaacatttcactgggaaaaatcagcattcaatactaatgcagagatggattttgtagtgaccatctatttcctgtgtctttaaaaaagagaaagatgaatctcatctttcttgacagtgtcctgaaaatatgcgttacattcattacatattccccggtagtcaactgacctgcacatgtaaggcaatgattttaaagtgccagggtcacttttaaaactctggaagaggacacttaacaggcaatcatttcaggcttagagaacaaaaaccatttgtataaatatttgtaaaagaaatttaattttttaaaaggaaaactcaaccaggcacggtagttcacacctgtaatcccagcaccttgagaggctgaggtgggaggatggcttgagcccgggaaattaaggccacagtgaactacaatcacaccaactgcactccagcctgggtaacagagcacaaccctctctctaaaaaagaaacaaacaggccgggcacggtggctcacgcctgtaatcccagcactctgggaggccgaatcaggtggatcacgacgtcaggagttcaagagtagcctgaccaacatagtgaaaccccgtctctattaaaaatagaaaaaaattagctgggtgtggtggcatgtgcctgtaatcccagctacttgggaggctgaggcaggggaatcgcttgaacccaggaggcagagattgcagtgagccaagatcgcaccactacactgtggcctgggcgacagtggcggactctgtctcaaaaaaaaaaagaaagaaaaaaagaaaaacaagcacaaaacgtctccattttcatccattaatgctcaccattaaacaaaagcataaaaacagaatatgtctgttttatgagcatgggaccaataattaaagtttaacatgaacagaattataaattcttcctaccttattaaacactgatttaaataagactaatgataatgtgatattaacttacaggtacatcaaaaacaaaaatgcgacacactttcatgatattttcttccacatgctagtgaacaattatgcaccatttttttcctacaggaaaactgaagactttaataacaaactctccaaggtgaaaatgaacacaggtatgctgtctgttagttttaaactcttttagccttgctctctaaaaatcatgttggccctaaatcattagtttagcactcttctgatcctaaatgtgattctgagtttctgattagatacatagcatagattcattactttctttctttgtatttgtgccccactcttatagccaccaaacatagaattttctcttctattacttgctcctactccctttttctctaatcacatgttaaaactaactcctataaacaataggaagaggtagtatgtcgtttgtttgtgtacttttgaaatctctcacttaaaaataggctaaattcaaaggcaagttgctctagaagaaaatattcaaacttacctgttctataaactctttatgttgaagaagtcagcagatagagtgccaaagttttatacaaaatcagcttaattaacctatagtcacaattcccatagtgttataagcattatatgtgtagatgtgagagtagtatctccaaataacttaacaactgtgtctctaaactgtattgtctacattttaactgtaaaagtgttcatgatacatgctttgtacatatgaacttttttccacagtagaaataatttggcttataattttgccttccccccaccttgaaatatacaatacaaagtaattcaagaaacaactttctcgttgaaattttgtaacttgtgtttaaacgataccatttcctatccacaagtgatcactggaaagttgtttgagccgtcgcgccatggcagagtagaaaggatggcccaagatattctctcatgtccagctggttgcctttttgaggtctcttgttgcatcaagtgctacaaggaggattacccagccactggcgaggaccaatacctaatccccaggtcgagtgcagagccttgcgtcatgtgccatgtgccgtagtggcctcagagaaggctgtgcgggcgggctcctggggatgcagtcaccttgcagacatgtggacaacaggcaagatgaggatactggagacagtcaaaacacacaaggaaggctcagcaatcaagagaagttataaccctgcatatgcaccacacaaaggcaacttgatgattggagatgtcagaagtagacatggggaatgaagtagaaaatattagcaggtaaaggagacagaagaaagcaaatagaatgtagagcccacagctggactagcatcagccatgttttggagctacaaagtcactccagcagaagttccacatgaggaagtgatatttcctgatccttccaagacatttccctgtagacttaagtggatcataactcccagtattcctcattttactgagtgctgattttcctatttattataacactattatgacagggatatgcatacatgatatactgaatatgctgtgttgatgggcagtacactcaataattaaccttcctattcatataattcaatccctcatagcaaaataagcacatacaaatttgtaaatttgtttaagtcactaaggtacttgacccaagttactgcttagcagcataaatgtaaccttctaaagcatcttctcatttctaaggagtaagcttgactctggatgggatgcaatttgtataggattattttgcttatttggatgaacttccacttaatgtataatgattggaaaatatggtattcaaacatatgcataaaattgatcaaaagtgactgaaaacttttgctcaaaattccaaaataataattataatgtttttataaaaacataccacttttaaatatatatgtatatatatacacacatatattgccttaggaatttgaaagcattgttactgtgtttacaaaatgaagtaggaatttgttcctaaagagctagtcaataaaactggcctgcattatctatctacagatagacagatgatgatagatagatagatagatgaataaagtggccccacaagttatttttctcatccccaaaatagcttctagctcttctgacttttttgtctatctatctatctatctatctatctatttatctatctatcaatagacagatagataatgcagataatatatggatagacaatgcagataatctatatagataaataatacaggccagttttattgatatatatatcaatattcatttaaacaggaatatatctctttattgatagatatatctatccaatatatcaatcattaaaaatatatattcctatttaaatcttcatgtgttggtcaccacggctaaaaagcattcttttaagttaagtatttgcttttaatcagtgcataataaactagccatggggaatgtggttaatttttcatactaaagtgtctaaacaatgtagaaaatatatacaaaacatgttatatgtccacttttagaatgtttaacacattactttcttaggcatatcttagctattgaagaaaggagagaaggaaagacatcaaataattatccatctataatttacccatatgaggggtttccagcagtaggaacagcttccaggaatcttgcagctcaggggaagagtagcctagcaaggctgcaggtcattaatgaggacaaaaggcaagaccagcgttaggattctttaggataaactgacacatgaaaggtagcatccttgttttaagatcttaaaaatatcttcaaggagtatcagaaagtatcaatacaaaaggaagtagaaacacaatataatagatcattctgttccagcaattttacaaatgcctcaagttttagaattcagccctttattaaactttattaaagacagagcctccatttatttcatctaagacttagagcttcctaaaatacataaattgtctaacccaaggattcccaaactttcttgttttacagtgacctttaatgtctcagtaatttcttcactgtgctcctaggtcaaaaatatgtaacacttctatttattaagtagttaggtgctaacaacttaataacttaataattactttataaatactttgttctaacaacttagaagccatttgacagaacagtacacataaattgaaagaaaatagttttatttctttctttataacaagaattacttactaatattatgtgtgtgcctgttgcacactgaaaaatttctcagaccttagaattcgattgtacatgaccactctcatttactgatctaaaatgatttacaggccagacagtcacggtggctcacgcctgtaattccagcattttgggaggctgagccaggaggatcgcttgaccccaggtgttggagacaagcctgggcaacatagtgagaccctatccctgtaaaaattttaaaaattagctgggcgtggtggcatgtgcctgtaatcccagctatgagggaagctgaggtaggaggatcagtttgagcccagtaaggtccaaatgcatcactacactccagcctgggcaacagagcaagaccctgtctctaaacataaataaataaaatgttcttcagatggtacttgctttttatcatagcaagtatcaaaatcccagtttttccaaaatatgatgtcatcaaaaggaatatagcgcgtctattatgttgaaaccaggcactgccccaagcaagtagttcattgagtgtccaacagttagcactgtgttttccttaaaaacaggaactaccccccaacaccctcatgaatgcaccagtgcagcccagggcatcgcagcccacagtttgaacaccagagatttaacctgtgaccctggatcttctcattctggaattttctcttttcacctatgtgcttgtgagatgttcagaattaacagaactaggaaataaaatcactcttagagtgatgtcagtttttactttcaacacctttgactacacaaccatttcaaccagtttccagctcctggaagcaataacatcacctccatcttatcagacgcacttgtctctaagcactttcagtttgctgagttcgctaaaatccttttggagcctttcctgaaggaatcttcagttgtttctcccatttgtgtcactttctttgggttcttaattataacctttgatttatttggttcattttcttttaatattctttcaagttggttttctggtttaatgattttctacattaagaaattgttactttaaacatatactttaaaaaagtgaagtaagaatcactccactgcttttaagttctattaatcttactatttataaattttatgaaaaattccttcaaattatacttccgagcatctttaccaatctaaattctgtcatgtccaataaacaaacttgatactttccttatgaaaataaagaaaaaggaaaaatggaaatgtgacaatatataatgattatattattatatcggtggttatattgtctttttttataactttcaaaaagatttaatttaatttggttttactcaataagcagaatgaggagaatgagcaaaactatttattgccatgccatattacagaggaatgtaagaatggaatttgaatctggtcataaatagaacattggccttccaattttaaaagacttctcttccaaatttagaagtctaaacttctcatagcacattaaaatggctgatgaacttacactgattttatttcacattatgacttgcataagtttaaagatatgaatcatagtacacatattgttaaaagtataaaagcaataaatgaggccaggtgcggtggctcatgcttgtaatgggaggccgaggcggaaagagcccttgagccagggagtttgagaccagcctggggaacacagcaagaccacatctctacaaaaagttaaaacgttagccggtgtgtgcctgtggtcctagctactcaggagactgaggcaggaggattgcttgagcgcaggaggttgagatggcaatgagctgtgatggtaccactgcactccagcctgggtgatggagcaagactccggccctaaaaataaaaatttaaaaagtaaaagcaatatactcctttctttaaacatggtcatttcgataccatatatatcaatacttttattttaataaggctagttatttgcataactaacactaactacaggaagagtggactttccatgatgccatgtgttcctctatgaatcctaaaaaaatgtatcatacctgtgtcactaataatttttactgcaagaattattcaagctctctttgggaattataacagctagaagatggtaaaacttaaatgatattaacttaaaagtatgttgtaccatagcctttaatcctgacatggagctaatccttgactctaaaagccagatccagtgcttatagatttagtataaattgaatttaaatggtataaacaaagttgagttctgtgcctgagttttcacaaagaaaaccataaaatgttaagtattaagtcttccatgctttcactaaaacagtgatacctatttctaagacagatccctggtcttcttttgttttgtttcgttttgtttgttttagtttgagggtggtgtgaaattggcaggtgcattccatgattactaattctaactgttcatctttctcatggatgtctggcacatttctcttaaaacgcatgatattgcacgtgcttttcccgttgccttggcctctgctatatcatttttttgcttccagatagcggtgggtgtgctcgcaaacgtgccgccatgtctgttacgctaacatctgtgaagagagtgcaaagttctccaaacctattggctgcaggtataatatcactaactcacacaatgtcgcacttgaatggcttctagctcttctgactgtttttgttctaaacgtaaaaagcaaaggaaaatgagatcttgtaggaaacattttaaatgtgtaattaaaaacagcagtcacttgccaaaaataggttgagtaactgcgagtgttaataactattcacgtttttgttatctcatgaacttaagtagcataatatttcattaagataactcagaggttttggggtttttttttttaacctaaaaacttttggggtaggggtacaggggtacaggatgaaaaaagggatttgtaggaaactgaatcttcattaactggattctttgtcaaaggttgtgaacagaatgatagaacattagttttgaaagagacctttgctttcctttaatccaatcagcaaatacccttctactatatatatttaaacataccaaaatcttgaccaattaagattcacatgtacccacagataggaagtcactgggggtgcgagatttcagcatccactcaggtggtctctttttaataaatctctgttgtgactacctaagccacagtaccgaagttaggcacagtacctaaggcacagtctgcactgggagggggtgcagctgttagaaggtcaaagggaggccagcaagcccagtgcctccagaccctgaaatagacccacacctgttggtgatgggttggttggtgggttggttggttggttggctggttggttagctgcagtttggggactgcttgttttttatttataagattaatgggtcttacagcagaagtgagaaagggatggggcatctttaaataattttaattctcattatgcatatcacagtcttctacacacatacatctagaagttgattaaatactcagggtgttcttcgctttacagccacttaattctaaactactgagtttttcttgagaaaaaaaaatgaacttccatatgcagaatcccacttccgttcaccacctctaatccacaaatggatttcaacgtccaagtttaaatgccaggctagtgagttcagttatatattaagttaaaagaaaatgcaagatgcattgcaaggtttatagtatgacctcattttggttaaaaaaaaatctctatacaaatctctatttgtatgtagtggctcatgcacgtatgaacataaaaaggtgttagaaaaactacagatgtatttaccttggataccatgagaaacaggaatgaaggcaagtaagacaataaccgtaagagttcagggccatcgtgtaattggaatgccaataccctgaatgtcattgacatttcaaccaaataggatctcagtccaacctactcagacgtgaaccttgacgcacgtaccagggaacgccacactgcttccacagtgcccatgtggagagtcgaaactgaactacatgcaatttcatataactcgacttcatagaaaagatttaatgcttcggaattacaacagcaaaaaagaaaaaaaaaacatttcacactttaggaatatgaaataatcttcagtaataacaatgtagctttgggctattttaagttttctatcactaggcatatgatttctagagaatgaagtccactgaattttggacataattgtttaaaaacagccctcttttgtgtcaattagacgtaaagtaagatccctttttctttttcttttcttttctttttttttttttttgagacgggtgggtcttgctctgtgcccaggctgcagtgctgtggcacgatcttggctcactgcaacctctgcctcccaggttcaagcattctcctgccttaggctcctgagtagctgcgattacaggtgcctgccaccatgcctggctaatttttgtattttttttagtagagacctggtttcaccatgttggccaggctggtctcaaactcctgacctcaagtgatccgcccgcctcagcctccgaaagtgctgggattacaggcctgagccactacacctggccccctttttcaaagaagcttccattatatttttgaataaagaagttagcattaatatgcacaactgcattctatgtagctttcataagaacttatatgatacagtgtctatatgtgaatcaaaagggaattgataaatatttattgccttcgatattgttaaaatacaacagcctttatgtaaaacctccagaaaaggtcccaagccattttcactcccttctctgatcagacagtcaatctgagtcaccacctatttgtcccctgagtcagtctgtctttctcttttccttttataagaagtaaattcccactggacaatccatcagagcacacacggatattttaaacctatgccaaaaccaagacaatgactattgagaaacaattgaaaacattttatttcaccaaaaccccttgtcagcctaaaggaatgccgcagtatggggaccactccgccaagagacagggtcttgtcgataccacctgcatgtttcatgcccttaagaaaattagtctgtctagatctcatttcctttctttccaatgaaaaattgtttgtcatttcttacctctctgaaagcttaatcgtttcccagactcacaaggatttgtcagaataaatgagaataaatgaagaaaataaatgaaaagggttataattgtacatagaaacacagtaggcactcaattagttgacctgaatttaatcaacattttaaaataattcttaaaaagcacttgagtcttctaaagaaatgagttataggcatcaaaataataattttcaagaaaaatatagtgatagtgtcaatagagcatatcagttaaaagggatttaaataaaacctgagagtagagattacgatgtgacacgtatcacaaacacagctacacgaaagctgtcatgttagaatgataacagtggaaagggccatggagggcatccagttccacccctgacatggaaccgggaatgtcttgcacaaaatctcagacagagactcaccagtttgtgcctcgacacaaggaaaagggctggtaagagcacgtggagctcttcattcttcaagaccctatttgttaaaatattcacatgcaaaacagccaggaaaggggaaaacttacaccatttagtcattcgtggattttcagtgaagcagtgactgtctactaaagaacactagaaattaaggactctggcccctagtcctagctttgtgtttttttcacaagtgaatgtgcaccaataatgctgcagatctggggaaatccattttccccacacatctgccaagccatttacctgggcgacttttttttttttttctaacctatattctctttacttgatgtggatccatgatactttctattacctgctccaaagaacaggtgtcctccctctcctagtctttcctgcagggataaaataaaagcagggctatgctaaaaagtgtccacatagaagactataataaaagagcaaatcaggactgggtgttccaagtatctgtaattggatttattttaaagaaagagaaatgaatgtactttagtctccttgagagaccagccacttcaaggcagactttaatcatcaacataagctttattaaaatactggttcatcctgaagttcgactcaatggccattttctcctttctcttaattctgcacactcgtgtccactgtgcgatgcaagacccttcagaacagcccacccctcttactgtctaatgtttccagtggcacagggacagattcatttggaaatccctgggcccagtgtcccaggaagaaacccacagttgagcctggagtgactgtcctctgattctcacacttaccgtctcctggggctcctcatcttcaacacggtgaccagcgtgaagaaacagagcctgccccctacagactatcatttagagggagtttatttctagtgtccttcagacccgcccagtacaccttcttctttctcaccgcacctgcacccttgcacctccaagcctctgggtcccattacctcgtccccagcgctaacacacagccttcttttttatctcagttttaccaaaccaagcataaaagaaactccctatcctcaagaaaaaaatcagaatataatcattgttattaatgctgcttctcttttcataaagtagcattgggctattttattgctttttcccaaattccaaaatttgcttttcgttgtcctttcccaaatcccaaaatttgttcattgtccacagtggatggcagcctcatggttattaaatctctctcctgagtgccctaaagcagcattctgatgattgctctgtattttttgtcaaactgtatttttctttatcttcatcatatagctgattaagaatttcaatcatttctgcttccatcaaatcctagaagaagggccaggcccagtggcacatacctgtagtcccagctaaccaacagactgaggctgtaggatctcttgagcccactatttcaaggacagcctggacaaaatagcaagaccccatctttaaaaaataaaataaaaatcaaaaaattgtacaaattctagaagtagggtccaataaacatttcatgcataattcttcaaagtaatttttctctatggtacccattttattactccaattttaaattcattggagataaaatccataccaagttatcaatgatcataaagaatgggaattcattagtcttctctagctcacctgagctggaatcattctaatgtactctgtgctgactcacatttgtgttccttcctttgatttggaaagaacccatatcaaatattttatctaaaaatcagatgctcgcatttctcagcccatttttatcattctaagttcatgtgtttaaacttgaaaataactgtgctgaagcactaaaagaaaaacaaagacttttccagcatgtaaaattcctgttttatgaattgaaatgggaatctaataatggtcctggggaacacgtagaaggaatccaggactggacagcaggttgggctaatgatccaacccctaggatcacctccaaagttaaagcttaatgaatctaagtaaagttgaccatgtgctttaataaaccaggcaacacaagctgatgacttaaaatacacatgagttaaacgtgcaaactgattacctcaaatgtgcatatagaagattttggaatatataacttcaataaaattgataacaaatatatcactgataacttgccaactgccttaccaaaagcaatttattagtcctgaaatttattttccacagcttactagctgaaagacagtggaacatgttgtaacagttttttcatatttgagtataaaatgacttttatattgcaataggaaaaaaactcagtctcgagaataatttgaaaatgtcacatgatatggtagacaggtctacagtttcttaaggtaaaaaaaaatgcgaactacagaatacagttctgtaacacaggagttaaatatgcttatcaacagcagggcattggaagctaaggatctggcagtttgagttagtgctgtttataaaccagatctcttttgatcctttaatttgatatttagaaattcatatattcatctttgccataataagattaaaattgcatgttgcaacattattgaggggaaaaatgagtgtttactatatagatatttatatattatagatatttaatgaatgacattctaattgaagtaaaaataaatgtacaagcctccctttggcatgtttgacatacccagattttaaaactgaaataatgtttgcaaaaacaatgcatatagttctttgccatgttatttttactgggttgttcatttatttcaccttagtcttaatttcaacatttttttttctttcagggcgtgattctcagtcaccagactcaggtacagaaaaaatattctgaataattattatattatttgtgacttttagaaaacatattcatagccacatcgctgacttcatgttaaatttaaatttcatgtactgttatgcatattaaattaaacctctagtaagaacactacaattttggaaataaaaatgattttggaaataaaaataaattttataaaaaatgtttaagtgaacgtagatatttttgtatccaattgttttcccttaatgaaagcttggagatcttacaatgatggcaatcaggagacactgaacggagatgctacatattcctctcttgcagcaaaaggttttagaagcgttcgaccaaacctacaagataaaagatcaccaactcaggtaaccctgcacactcttggctactgcattattttaaggcatgattattagaccactgcttacagcctctttcctaatgtgcgtatttcaatacgttttatttttaatatgtttttgcttttgtatttagtttgcttgccaggtttgtatttacaacatggagaacaaattttaacaaacaagggtttggtttggttttgtttctgattaagcttatcaaagtatgtcggtttttaacataatctctaggatatattctaattctttaaaagctgacagctgatgctttggatttaaactgatgaggtcagcaatacattatgtattcaataactatgagtatgcaactattatattaactaaaagggctctgtgttggagatattagtaaaattgtgccacaagcatgaaaattgttataaaacaatgctattaaataaactatatatatatatgtcaaagtctaataaaatatgccaagagaacatatgttcacttttaacataatttccctgaatgtagatggagcaaatgttataatgtattctctggcaacacttttttccccaagggcaaacattgataataaacataagtgcattctaaatggaatgaaaatgatcactcaatctagctaacaaaatggatagcataatcagaaggtgtggcattgctttacttctgtaaaggcaaggttgacactggtttctttcatgactaacttggactttctctgtttttctttcaactttatttctttctctggatcccattgtcaatccaggcaccccctccaccagaaagaaaagagagctttcatagctctttgataaccagtcacacaaagggtgtcattttagaccagttagtaactaacacacaaattccctccagtacagagtactttgctaacaaaaaacctcttcagggaactatgtattccaatgaagattcgagacagacaattgtatattctgaagaatctaacacaaccatgtcatatacacaaaaaatcactaatccactaccagcagcttccagcacggatcctgcaccattcgctaacatcaacaccccagttctacaagaggactacaggcaagattctcaaactcggaggatttctaccttgaaactaacccataaccaggatctaggaagtagcagccccattagtactccacagttctccaaatctgtcgaagtaccgtcatttctcaaaaggccccgctcactgacccctaatccagtgcctgagacacacacagcatctctttccattcagatagctcccctttcaggacaggatcttgaaagccacaaacagctacctgagctttctccagagactgcaaagatacctcttcagcaagagagacaaaaatctgcagttgcagcggcctctcagtcctcagactgcagagtggtaccttaagcttctcagtctcttcgtattaatacatgcgtatcgtagagaccctaactcctttggtttgggcttcttatatgacctaatgctttcttagtttccaagcaggaagggaaaggagaaagaaaccattttccaatttaaaaccctactaaattcatcagcaaatgtctaggtatttttaaatgtaaatatgcatatacagatctttcatccagaaatcatgttctaaatttttttttttcttctagatgtttatgggaaatcattgaggggtcagttatcatttaagacattgcagactacttcaggacttaaagcatgtttaggtttcaaagaaatatttttcatattagatctttttgcacttagatttactttatttacatgtgtaaaacctcttcagataattgtcaattataatttgctttggcagggaatagttatcttaattttaagcaatgtctatttctttgcaactcaatattcattttcactaaaacttaatttatcatttcagaaagtgtattagccaacttttattatccagactttcaggaagtaaaactttccatgtgtgtagaattctctcatagcatccttctgtttacatgtattagtctgttaacaggagaaatgtgcttctctttttgacttctccatagaacaatgtagtgctaaaagcacaaactttaaggataagctgtagattttaatccaggcatcatttactatgtgatgagacattcatctaaacttttctgtgagtccgaacaaagaaatgagaatactaattaacccttaatttataggttatggtaagactagggaattaccatagactaggctagagcaagcactcaatgacagctgttaataaaagatataatagtagcagcaacagcgctagtgttaatattgaaaacagtggtgcctaagtaaataatttgtataatactcctttttgtatctgtgttaataaagatcatccaaaacatatcctcgaggagatatacttttaaactgtacagaaaatctccaaaagataactaattgacaccaagatccccccacccactcataaagcagacgagccttaaacagaaatgattaaaggacaagctggtattatcatacctctactaaaatatcttctccatcagccaatcaagatgtgcaaaattcgttcagtagagcaatttcttctaattaaggtaatatcttctgaaagcacctatgaaatcagatgataataataataataacattaataggagctaacaaatattaaggccttactctatgcaggcactgttgcagcttgtttatgtttattaataattgccacaatctcatggagtaggtattactactgtccttattttatggctaaggaaactgaggcacagaagtaagttgctcccccagggtcatgcagctggcaaaaggcagaaacagaatacacaccctggcaggctggctgcagggccaccactctgaaagagtgctacttctcgttgtgaagtcgttactcagcagtgacgagacacggtgccatgatggtgggagctgaggcagatgcatcttgatcgggttcaggagtccaggaaggtcggagggagcaaaatccgtctgtgactgtacagacaggcccgtgccagtgtcagtgagcagactcgccagtgtcccaggatgggcacgccaggaagcaggtgtaggagaagtcataggaacacatatcagtcattggactcatccaacctggtttgcttcttcagaatggttttgtgatgtttgaaaacaagctgatacctttcgttttgcatggttttatccaggctgcgcagagacggttagtttgattatattatccccagggtatcggcaccatctaaaagttaagatttgagatcctgtcactgctatttattcaagaaatatttattgggtgcctaacctatgtcaagtctgttctagtaacagagttggatttgaaaccattcctgcttaaaatttgtctgtgtgtggcaggaggagcaagcattaataagaactggagtaaattacatatattagaagattatggaaattgagttatgccatgcaaagtagagatgtggagaccagatatcatgtcaagtatggtaactcaatatcaatagacctcactgaaaagagaacagctttgaaggaggaagaatattctaggcagagggaatgtcttatgtaaaggctttgaggttgatcatgctggggctgtgggaggaccagaaggaagcctgagggagggagaggaagtaagtgaggtgagagtgataggaagtgaagtcagaggtaacaaagaccagatgacaggaggccttataagccattgcaaggattttgacatttactctcaataaaaatggaggtcactggaggatgttgaggctaccaccattattatttcccttatattttaacaaaatcattctggcagctcagtgaaaaacgtaccatagtggggcaaggaggagatcaggcaaaccagttaggtaactactgcagtcctttaggtaagaaatgatggggctcaaagcagggggcagcagaggaggtggtgagaaatcagactgtgagaatgtattttgaaagtcaagcaaacaggacttcctggcagattgcatgtgggatgtgaggaagagaaaagtcaaggttgactccaactggaagatagcatcgccatcagctgagactggacagctgtgggtggaacaggttggtggaaacttcagaggttccatttgggaaacaggaagtttgaggcatttcttagacacccacattaagtggtcaagtgagcatttggatgtaagagcctgtacttcaggggaaaggtcctggttggaggtatcagccattggctagtcgatgggttttgtggccatgagacagagtgagatcagcaggggaaggacagagaaaaggggaggaccaagagttgagcctgagtgaatctcaacattaagaggaagaagcagtggaggagactgaaagcagtgtcctctaagggaggaggaaatctgggaaaatgtggcatcctaaaagccatgtgaggaaaatgtgtggaaagaaagggatggttcaccgcacaaatgctgttgatgagacaggtttgaaatgaaatctgaaaacttaccattgattccatagtggggaaggaggctttcttggagtgggtatgagagagactgggaagaaagtggttgggcagtcagctgtttcaagatcttattaacataaaaccattcatctagttattcaccctccccgagcagcagttttctcatctataaaacagggacaatgatagcaaccattcatagaactgctgggaggtttgagtaaggcatataaggatcttggcatggtgcctgcttcatggtaattcttcaacatacagtagctgtcatcatcattaaataatatttttccaaattatgcatctgattgggaaaaagaaatatattattttcaacaatacttcattttttttactggtaggtaaaagtttatttcaacagactttcagtttgttccaagatagcgtgtcctcttttctaaggctttttaaaaaaggtagcatgaagctgttgcagtttttattctctgtttaaaattttggtaagaacatttaacatgagatctgccttcttaacaaatttgtaagtgtgcaatgcagtattgttaactgtaggcaccatgcagtgcagcagatctctaggatttattcatcttgcataactaaaactttatgcccaccgaatagcaactcatatcccccttccccaagcgcctggcaaccaccagtctactctctgctcagatatttgtccttctgagacaggccttcacttggtataaggtcctccagattgctccatgttacagcatgtggcaggacatccatcttttttaaggctgaatagtatcctagtatgcgtatacaccacgttgtctttatctatttgtccatcaatggacatttggtttgtttctacatcttgatgattgtgatatgcttcatttttaagtctcattttccatgtaatgacctttcacaatggtgacctttccattttaaacacttgcactccgcattctggcaagtctcagccaatgccaagcactgtaagctataccctgtgagtcagccaaatatgtgctccattataaagaattaggctcccaggaattagcaggtccaagcgataaaagtacaccaagatgtgaaaagtacatttcagtgtttcagaagttttatttacatagttttgttattattaatgtctgctcattaatttaagaagaaaactacaggtcactgttagaaattctcttcatatttgacaatttttcatagtgttttctaaacggcatgtgctttaattgacctcctacaaacagaccagaaatgaggcatgttatccttatggcactgtgtgatcagatatcctgttgctaaaaatgtcacattgttctcaatgtcaagtaagtgaaggtataagccagacactttggaaagccagcaaaaagctacacccccaaacagtttctatggcatctgtgctatgttccttgcttcaggaagataagcttgtcctgtccgttatgaaataacataatcaatcatttgccaaagcctcaccttcacagctgccactgcacatatgctggggactcacaggggaacttgcccgactgtcatgtagaagggagaggaaactcatttcttttgctccatgggatcagtatgtagatactaaggaggacagagtaatgcagacatgtcagcagtgtgggataataggtgcagaactgcagaacgcactttctggaacattgctatcaagaccggccccaatcattgatgtcttccattagtatggcttcctttctgtgggctcgtaatgctattagttgatcaggtctttggcaatttctccatttgatgtctgtgcatgcgcatgcatatgcatgtatttaaataattgaacattagagaatacttgggagtccaacatgagtttacaaataaaacgtcctcttcaacatctcccaatagatgggcatccagccttttctgaatacacttaatgaagagctcagttacattccaaggcagcagtccagtgcttggccatttctgagatcgaattattggaaagaatttctaataccacgtcatgatctgccttccttaacttctgcatggttatccacagagcaaaagagacagaatgttcttccgcctctatctgacagtgttcacgtgatccttctcttccctaccctgctactggctttgtgcagagcattcctgttccttcccagcattttaattttgtaaaacatgattctcctttttttgagagctattacagcacaccaggcactgtgctaagcactttacattgccctacttaatttttacaggctttaagagatgggttttatccatgcctatattttacacatgaaggaactgaggccaaggaaattaaacaagttgcccaagtctgtctgactcaagatccacagctcagccactagcctctgctacctctatgctctcacacaagctgatttttaaatcccatattttgataatgttcttaaaatatgacactttcccagatgcaaaaccatattcccgatctgaataccacagagtacagtagaaatatttactcccctgattcagatgccacatgctgtcagtgtgcccaatctgtgtgacaattttagatcacttgtcacccagctcttgggtggggagtatatggttaaaataatttttattatgaggctgtcagacaatctcacatcattacaatgcaggcaatacagccaggccttagggaaacggggcaatggccaggcagctaccctccatccttctcagtcgtaggaactgcatagttccctgtctgtctcttagtttctgctctgtcgttacttcaagttgcccatgggtttccatgatactctctgactccttgcatttgggtacccgacagctacctgaggggcattcagtgtcacgtaattcaaattcccaggagggaggcagggccccactggcccagcatagtccagttactcccccttcctaatcagctgtggccagcaaaatgatgatccggcaacagacacagctgccaggcaggtctcctcataccaccaggacaggccatgaaaagagggggcacattttccctaaaggatgtgtggatgggaggtaaagattggtttttttaaaaccccttccagccgggcacagtggctcatgcctgtaatcccagcacttttggaggtcgagagcaagactccaaaaaaaaaaaaaccccttcctagatattttcttttcaagtaaattactatcattggaaaaaagagaacaaaagcctgtcagatttctttgcttgacatttaatatatattccttatgttccttgagaaatgaggcctagaagctcaatgactaaaggtgttaagagagagatgttaggatccttgacctcagggccatgtcaagccaactggaacctgaggtggaaggaaattctgtgcttccttatacctgttttcatatattgggaatgagctttttcctagaatgtttaagtcattagaatttttttgaaaagttgaaacgcacgttattaacactcacacattattttaagcttaaatattttatttaaagcaaaataaaccttttttttttaaatttgagacagagtcttgctctgtcacccaggctggagtgcagtggtgtgatctcggcccactgcaacctccacctcccaggttcaagcaattctcctgcctcagcctccagagtagctgggattacaggcacctgccatcacgcctggctaatttttgtatttttagtagagacggggtttcaccatgttgtccaggctggtctagaactcctgacctcaggtgatctgcccgcctcagcctcccaaagtgctgggattacaggtgtgagccactgcgcttgccctattacatgtttacttcaccttaaattaattacaaattatttaagatggccatcagttaattggaaattgtcaaacatgtctattctctcaactaaaactgaaataagcaaaaatgtagattttgaaaatattattgatgagttttcttgcattaaaaacgccagacccagactctcttttcctatggcttggcatgcgctggtcttcatttatattttcgacatttttgttcagtatggggtatttttgcttttttgcattgatgttgattttctttcaaagattgcattgaaacagaatttatctcaattactgagttttttgtcactctttaagttttgcaccccaacgagcactttcccctcctctcctgaggcctggccatgcactccttcttcacatccccgctccacagctaccctcttccacctccagcttccacatctgctgtgtcagcaagtgacagcttaggggcttatgactatagatgtgttgtcactgagcttatgagcgaactaaaggtcatattacccatgactatggtggtcttagagacagtaagctttaattttcatcgtgtttcaaggcaaaggatatgggtcaatgacgcccgccttgagggggaacatgacttccgcattctgccatcggtcccatcattccctgtcatccaacacgggcttgatttgcacatcctggatactttcctgacccatgatgggcacttgagtttgcaatgccttcatccaactcaatacactttttccactgctgaagctcaccctcccttgaatctctgtgccccttcattcctcaggagctccagtgttgattggtgagcactctcatccacaggctctctttagcattctgggttggagtcatttggacgaagaagctcagtgctagtttgagtaagcaggtgctctctcttggtatatgaagcatattaaggtttaagcaccgtccctgtcctttgcagaagaccaggcagcccctggctgctagctggtgtttctcattaccctcttcctgctagctcaagggttggggaaagaaaaaacaatttatactcacaaaaagttggtgacccttgatccctattcaaacaccttagccttccatggtcttgaaaagaaggagacctaaaacaattaggatgattacctgcagtcatctacttgccactcatgaagtaagaaaaaaatacacttgtttaaagccagttttccctatttttgaggtagtccagattgggaaaatactgccttcttcccctttcatacctttcctgctgctcttctgattttcctcaggagaaacacgtgtaacatggtctttctttccccttgggtctacagggtatattccattcatgtgaagattggggtcttgtcaaagcttttttgtgggtgaccagtataactgttgaattattgagttttatctgtagaaatttaagtgtgatgtgactcaccacgaggcatttcatgccttacactcacaaacacacacacgcacatacacacccatacacacacgtgcattaaaagactcaaaaccaggagcatgtcaggaggtggtgaaagaaattcgaaaggtggaataattttgttttctgtggacattctatttggaagaacaattgaatgggtaaggaccatccccagacacagtgctatgcaaactaatgatcatattacccgtgacaatggtgattttagaatacgctttagcttttgacatgtttcaagtcataggatatggacaagtcagtccaatgggggttaaagtcattagatttttttcttttaatttgaaagggaaaagtctcatgagcagataactcaaatccttttgtatgatttgtattatttcatagttttcatttagcataaataaaactaaaaagagattcgtattacatggaaacatccttagtaaagctgaattattaggggaaatttcattgacgctatccaaagactgctttatactgaattacattcagacttatagcaacattttaatacattaagttagaattatgataatttcataatattaaagtttcacctccaataagattgcaattattgtaaacactcagtaataataaggatgcatccccaccaaaacattttaagttctgggtaactaagatttctgtcagttatttctagagatttaaacaaccatgaacagtaaaatatatattatatatatacgtatatatatatatatatatcacatttaaaatgactatgtttaaacaagaaaaaaaatcatattaagtaagattaggacaagaaaatctgtctttttatccaaggttggggtttcttaacccattagattaaggttatgctttagagtgtctctgtccccctgaagtttatgcagaactttctgtatgtatgaatttgtgcatttccccaaaagaaggatcagtcacatttatcagatttctaagggatctatgattcagagagacctttttatatgatggattttttaaaagtattcaagtaaaagtctgagaaaaaaattattgcaacctttttattatgctaacaacgtgcatgacatcagtcattatgaaaattatggctgccaaagaacaccaaattgtttaacttaaacatttactaggcagtatttctaagtgtaaacagttctccttcattcattcccatctttgtactaatatctcacaatacctctggccatctatcttaaaaccatttcctctcccaaacatcccctccaaaaagtgtctgttctgaaaggtagaaaaaataagtaagaaaagttgcttcggagttttattcacttacgttgaattgagtacttatcatcctatttgtcacgtgtggtcaaacgtcatccaggctaccacaggtggttgtaaaatttcaaatggtcatcttctctcttcctcctacagagcatcccttcgctatgtttagcctcttgggctatatatagccttggagctgttaaatcttttatttttccttcagtttctttctcctttacctaagatttagtgccaaccatagttctaactaactagggtacattctaactattatcagtggctggttttcattttcacacatggtacctctatttgcattgctaggatattttaaagtccaattcttttcgtattttgtagtgaaatcaaagaacagatttaattagtggaaaggaaataaaacatcttttccatttatcttttctgcttagttgtgtttagtattatcagtgtttagattcataaaccaggaaaaaataagacaaacagatttatgttttggggacattttggcaagggggaggcaattatgctattagatttttctagtgaaggacaaaccaattctgctgaccgatagtctgatatcttatcattgtcacaaatacaaaaactaaaactcctgaggaaacagtttcgttatgccaacactctcaagcccctaaccagaattacattgcagtgctgtgtgaaaaccggccttgtttcaaaacacaccgactggattcactttcttcctgttttcacactttttctgcactgtgtggttggcacctaacccatctgaatgtaactccttaaagtgcttgcaaataaaaccgatgctttgccttctctgccacatcgcaaaaagaggtacttttgttaattggataatttatctcttattattttttcctcatactcagcttggaaatcagaacttacctgccagtgtgttggaggtaaatgcttcacagacacacagacaaaccacaccagaagcttctcctccgtgccctccttccgtggtacctttgaaccgagccactttctcaccaggcagtggcaccagctcagcatcactcagccttccgccccccgatggtgtggggtcttcacgcctgcataatccccagagcctttcccattgcttatacaaacacctgctcccagctccagaaagcctcatccacagccacgacacaggctctctgacaacagactcctccctggccgagcactcctcccgctcggagagtgagtcctccacagccatgctggaggagctgcagattggtgactctgacaccactggccgttctgagacaccctcccccacctggggtcagaggtctgctgtgacagatggcaccaccttaaccacccctgcggccactcatgtaattattctgcctttctttgcctccaccgtttccttgaaaggactgatttgttgtgccatctcatttttcggctgacatttttatttacataggtgttgattcccaaaccaattctatgccatctgtcagggaaatcattagtcatcctataagcttgcttaaggctgaaaaagtcacttcattctcttcattcattttagaattacttatagttactctaaaatagttacttacggtttcccgtgttactgtagctggtaagttctacagtgatttgccttattagctaagtatacatcacaatatgttgtgatcataaagtctaaaatttttcaaaaaattttaacccagtattaatacatgttagcagtttttctcacagactcacattaatgtgtcctgtgtgactcttttctatatcctttttctcacataaatgattactgactgcatgaggctaatttttcttgttcctccttctctaacagctacaacttttgaactcatctattgtccaggagtgaatgatgtcgataatcctatctacctttcagaaatttagctgtacgatttttaaaaattattcttcctgagccatttcaggacagaaatttatgaatacattttttattttgtttatcaataatttgtctttcatttatagcaatatatacatcttttccatacatatattatttaaatatatctatgtgataagcaatccctaataaatgatctgtgaatggctaaaatgtttcaaaattttatggcacagattctatattgcatataatgtctaagtaatggcttccatttaagagacacatagcttcaggcaaaaaaatcagattttttttttaaattgatattataatgaagttccgaataagcactgtcatagacaaaattttatttgtgctacattgttttatgttctatcaagctgataagtctgcaaattttatgcgcagagaaatgttataataagccatatgttttttaagacactacaatttacataaagtaaaagatgctttttttggtaatgggatttggtattcccccaatggctgtgtctaacactttgcattcaaatgctccattcagagactggctacagaaggagcctcattttccaggcctaaccccatagcgagtccctccctgccacagaggaccagcccaactacgggcaccaggagcacagcaggtgtgggttcctcccatgccctactgtgcttcaatggttcttagcttttaaaactttaccaggacctttaaccaaaaaaagaaggcagtgagagggtatcaatctaccaactaacctgttcaattttctgtttttaagactttacaggagactaactgtcttatatacagtcttgtgggcacgagcagagctacttgtaagggaaattaattgcaattatcagtttaaaattgcaaatagattattcatgacatgtttttcctaataatgaattcactataacaatacagtattttctaaaatgctaatgatagtattttagtcataaaatcctgattggttgaacacaataaaagaataaatctaggccgggcgcggtggctcacgcctgtaatcccagcactttgggaggccgaggtgggtggatcacgaggtcaggagatcgagaccatcctggctaacatggtgaaaccccgtctctactaaaaatacaaaaaattagccgggcgtggtggtgggcgcctgtagtcccaactactcgggaggctgaggcaggagaatgacatgaacccgggaggcggagcttgcagtgagccgagactgcgccactgcactccagcctgggcgacagagcgagactccatctcaaaaaaaaaaaaaaaaaaaaaaaagaataaatctactctcagtgtttacttttttaacccctagtcaatattattgaaaccatcaaaataggattcagagcaagtttgtaggtttagcaatatagttaacctgatggtttttaataagaaggattcttcagcttttaacattaattataacatgttataatagtattacaatgatattgacaaagatccaccaaacttaacttgggcaaggaggtgaaagtgttctcaaatcatccatcagaggtacataaaagctctgaagatttgggcaggcctgtgcctcacagttatttgaacgtccagctctctccagggagcaggtcctcaagatgtggctggttatgatatgagtgtaatttttctaacagcttagagaattatttaatcaataagcacaaggcttgtaatgaaatgtttattgatttggggacataagtggtatggttatacagtaatgaaattagacttattctaggtcatttgaaaacccatttgctttaaagtgaaatcatagaaatacacagttactatatctatgtttcaagcctgtggaatagaagtttgttttgttttaaaataagtagaaaagtttcacaaattatgcttctttatctgtgtgcctatgtgtgttgtgtgtatttagctataattttaactaaacgttcttactaatgtttgatcttatttgcatgcattgtgtgcgccctgtaatgatcagtactgtgctgtgggtagacaggcatgcttaatagtcctgagctcgatatctgtgaactaagccgattcagttccatcagaatagatacctattgaacatctactctgtcatcagcactaggctgcatgttatacaaaatattaaagaagcatatatatgaccatcttcaacaagaagcttgagataccattggggatataaaatagtcagatacggaacaatcgaaacaatgaataattaagaaatcaaacagagattcatgaagtgctcaatgaggctgaagtagggagaagccagtggttgaacatgtctctctgatcctttaccaggtatttgatccttctagaataggttgcttcatgatatatacatccaaacaactaggttccttatgttattcaccagctctggaaacattcattcactagaagatatccctgactaagtctgagaaccaatcccttgcctcatgtcaaaggacatccacgtcaatgctgcatgcggaacagcaccaccgtgttctgattgctgatgttacgactgtcagagcaaagtcgtcctccacatttacttggtactgactcctactgataccatttggcacctctgttggcagagtggcatgcccactagtcagccactttcattcttcctaaccactccctggaccctcagatacacaagagagtgattttcagaaataagggaatagagagaaggcaaagaatgtagcatgccctctgacatcagttttcaaaataaataagagcttggcagctgattactctcatgtgattggaagtcttttattatcacctaatggaatgatgtttacagggaactatgtgctaatttaactcgatgcctttgcgcttttctcagagccagataacagtgaatggaaactcaggaggtgccgtgagtcccatgagttactatcagaggccgttttccccctcggcatattctctcccagcctcactcaactccagcattgtcatgcagcacggcacatccctcggtaagtaatttactcaccgtgatttccatggcaacctcaatgcggcaagtacaaccacaggagaaagatatgcggcatcaaggtgaggcgggagcgctcagcactcatgaccctatccccagggagaaactggggcagaggacccaacatgggaggaaatgggcaccatgctattccaagaccatgtctccacctgtgtctgagcctggtgtgggcacttagatgtctgaggtggtggagtagaaagaaaaagaaaatggctacttagggcaagggggtttgtgccactggaggacatgaatgcaggttttccactagggcagcttgttcggacttggaagagcttccaccatggactatttcctggggtctatataagggagaatcgtttgacagttaaaacagtgtaacaggaggacaggctgtcccacatagcagggacgcagtcatctactggctcacacaaggagaaaaccaccattcaaaccaaggctggaagacctgcagtcagggatatggtagcaggaagccacacaagagaaacttaagtgttcccttaaatgaaggttctgtcattgtatagagcaatcgttctcaaccctctgaggactaggaattcagtgaaagatagagctctcctccagaaaacaaatggacatacggacgttcataaaaaattgtaagcagataatttcctggggctcatggactttttgtggcctcctgtgaaagaagctttgctgtacagtgatagaaatgctcttacatggtcaagtatgttcagatagttcagaaaataatgtgataaatactttttttttttttttcaagatggagtctcactctgtcgcccaggctggagtgcaatggggcgatctcggctcactgcaacctctgcctcctgggttccagtgatgctcctgcctcagcctcctgagtagctgggattacaggtgcccgccaccgcacccagctaattttgtatttttagtacagacagggggtttcaccatgttggccaggttggtctcgaactcctgacctcaggtgatccacctgcctcgacctccctaagtgctgggattacaggcatgagccaccgtgcccggcccataaatatttcttagtttgtaaaaatgtaacttaaaaacctaaaatatcaaaaaaaatacgaaattgaactatcataggaattcaggctgtacaagtttccatgatgtcgactcactaggaagcttctaggacagcagggagcagaggggaattctcaggacagcagcaccatcctgcacctcccagaaaaggagaggcctggtcctctggccacaggggccagcaacagggggaaagaaactaaaacccaggacttgaaccaccatgtcttctttgacacagacagtgcacctccttccccagcactgattcagtattgagaggctatgatgctgttcgtttattcagggatgttttatgtcaccatccagcatgtgcatggtggaactcagcttctgaggtcaaccaaagctctataactataaaactttaaaggtagccgcgggacttattaaagtctaaatatatctgtgccttcgctgatgctatgcctgaggatcatctgtgaatcctacaatgatgtccttttagagttaagaaagtaaaactggtttatgccgaaattttgccctttaacaatcagcccatagtgtggtgttataatggaagtccattatatctagattgtttaaaatggaactatgcatttacacacatataaagtaaaactcgacaaattattctagccacagctttttcccaaataattattaacaaagcctgactctgtctcattgcctgtcttagtgaatgcagttttgtccctatccccacccaacaacaacaacaaaaatacttgaatgtagataggctttgattttagaatatattgataagtagattttacatataaaatattctgcatgggaagaaattcccaatgtaaacactgaacaaattccagctggccagtgctgtgataaggtttcggaggaatatgtacatctaccttgccctagatgaattttacacttagtttaggacaaaagattgctaagatgacagctagtggaccatatatgagaataataaaataaagggttaacttatattgcataaggtatgggttcatagaatgtaatggatcagatgtgaaggcagagttgattctccttgcttagagtaggactttgcacatgctggtgttcaaaaaacattcgtcgctaataaaaatactagtatcatggaggcccactcaagtcctttttggaattaaatagaaagtcaattagtgtcaaatatctcaccgtgtcttaataaggactagcttagccgggcgcggtggctcacgcctgtaatcccagcactttggaaggccgaggcgggtggatcacgaggtcaggagatcgaggccagtctggccaacatggtgaaaccccgtctctactaaaaatacaaaaaaaaaaattagctgggcgtgatggcgggcacctgtagtcccagctactcgggaggctgaggcaggagaacggcgtgaacccaggaggtggagcttgcagtgagccgagatcgcgccactgcactccagcctgggtgactgagcaagactccgtctcaaaaaaaataaagaagtaaaaataaggactagcttgaatgttattttcacattcaaggggccagtagcagggggaaagaaactacaacccgggacttcaaccaccatgtcttctttgacagcagccagcacacctccttccccagcactgattcagtgttgaaaggctatgatgctgttcgtttattcagggacattttatgtcaccatccagcacataaactgcacataaagcagttttataactagccttatccattcttcatcaaaaaatgtattaaaaatgactttctgatgcaaactaaattgaaaatagtcataatcatagtaatagcagttacaaatgttacaatggattttacctcagagagatctgaattttaattacccttatattgatgagttaaaatttcttaaaaagcttccttatggccggccacggtggctcacgcctgtaatcccagcactttgggaggccgaggcgggcggatcatgaggtcaggagatcaggaccatcctagctagcatggtgaaaccccgtctctactaaaaatacaaaaaattgtttgtattttgtacaaaaattttttgtacaggcatggtggcacgcacctgtagtcccagctactctggaggctgaggcaggagaatcgcttgaacccaggaggctgaggttgagaccacaccactgcactccagctgggtgacagagcgagactccatctcaaaaaaaaaaaaaaaaagcttacttattttatacaaatttttcatgaaaaatacatttatacatgatatatatcatatacacataatgatatcaatgagtcccaccctgaaacatgagaatttttttcatttccaccttaaaggactttctgagtggcagtcctgacaaaccatgatataaagagtatatacaaagtgtcattctttgtcaccaacattttcaaattaattgcagaaaaatataaaggcatattattaatcataccagaggaacggtaataatgatgatttttttaaaattcctgtgtattagaagtaaatggactatatactgcatgtctgtactctgttgcttctgaaagtattctagaagttactaaaaaacatgaagaactcgataagcctcatctaaattatatccttagggcagtttttgtcatcaaagagtaaaaagtcatagtttttgatattttaaggtaaaaatgcacataggaaatcgtactaataattttacagcatttatttattcagaagctttcatgtccaaaggcttggatgtgaagatttttttaagtgatttttggttttgcttcatttttatgaaatcactgttactgactcaacagtcatgtctttgtctggaaatacatttcaaaacctataaataatagtagtagcagtatcacaagaataatattgatgtaaatgatgacctgagggaaattactgaacttgtctcagctcctgccccttatctataacactggttcttgctccccctatcctgccctccctcaaagattactggaaggataagaagagataatgcatttagagcacttcctaactcagaggcctccacacagtcatttaacaaatgccattcttccctcagccttcttcataaaatggtgaggcccttgttggtataggtctgttccccgcacacctacacagtttccaccagctcagatggaaagtaaatgagttaaaagggacagtgatggcaatatggtctctgtgttacagttggcataaatatacaacaagacacatgaatttatgattccctgtgcaacgaatacgttccatgttaccaaattttctgtgcagattccacagacacatatccccagcatgcgcagtctctggatggcaccaccagcagctctatccccctgtaccgatcctcagaggaagagaagagagtgacagtcatcaaagccccgcattacccagggatcgggcccgtggatgaatccggaatccccacagcaattagaacggtaggaaatgccagcgtgtgcgtctgtctggggctgtgcacagactccacaaaggacggattgtccacggctttgtgcattcctagggtcttatataaggaggattgccctccgtgccatccgacttctcatgaatgttatgctgtgtgtggcagagaaagaaagctgttgatgggagagaattacacaatctgtttttccatttgaatgaaacatcatgaacattgcgattttgttaaatggtaaaactgtgttgtgtggtttagtttgtttgtttgtttgtttttcttttaccttttaccaaggaggcttagggcaatagagagaaaagagaaggaacaagacaatggaaattctttggctgcattgaattcccacatgcattgcgaataaagcagtgatgtgttcgttttttgaaatagatgtgtgttaacaccgggagattggaagctgtgatttgggagttgggaggtgagatgattggagtgaagagagttaatgtcatggaaaggaaaagctgtctgaagaaaaatacacattttaatgtccctcttcagccgtgcctgctgagagctctcctgggatgataagtgaaagtgtttggatttttttttaagttttaaaactctgccaaagcattgctcagtgtatctgggcagccccttccggcaaaacgcagcagtagcagaggcagcttctgagagcctgggcaggcagcagctggctgaccaagtccactggaagagaaggcttgtgccagccgggagaaggaagccggggacaggatgaaagcaacaacacctttgcaggtgaagttgggggccatgcggggagggactgcagctgcatatactttgcagcaagacccatgtaaagctggggtgtggccaagagctgctcccctggaatgcagacctgggcagccaagacaataagggatagaggcaaagaatgggaaagagagcaggaaaaaaaaaaaaaaagccgtggtaagattggaaacagtcaaaaagaactaacgataaagtgtggggattttcttctctccttgactttacattcttatatggggattatgtgttttatatacagacagaagagtttaaaatggattattctcagcatctatattacaattgaaagccaaaaagtaaatctgtacagcagttactggggttttagactctttagattgaggaaacgttgaatgtgatatgacattctaacaatctgtcttgaaactgacgattgccatatttatgtgccaaagaaaagttcagggattatgaccaatattcttcattttatgatgattacatgtttctggtgatgatgttttcttgttcatttcccttctaagatttctgactcaaaatggttaaatttgaaactttcttctaattatatagggatagacagtcagacagaaatggtgtcattggttttgtgtaactggcacttgaggcatagtatagacaaaattaagaaagccctgattctatgtagttatagattctgtctgagaggattttatcaaagatatctgggtatgtttttaggtcaataaatgatatataatggacatgcaagcctggtccatgttttcttcctttataagacataatttccttaactaaccagactttgcctggttagtttcaaaaggaaaaactgagatgctagagatggttgatgaaaattaaatcatcttaaaatttttaaaatgtttatcaactgccaaatcaaaagcacgtttgggtatgcataagcaaacacactaaacatttaatgccagtttcccttctataaaatagaaaacacaatataaccaatgcagaagttccttataaggaactgtaatttttatgcacaattgttgtcttacttggacctttaaaacttgacaaagaaggtccaggtctatgaggactctcctcttacactgactatacagccctccagagtacatccccatgtatagctgtggttataaatgtcaagtcaggctgtctctgagccacagcaggccaagactctccaaggttgtttttctttctcatgtgtagaaagtaatgatgatcagattcagtgtatttgccaaaggcggtactgtcacaatgtaccatgctgcagtatcgttttagacagccagcctatgccgaggaaacagaattttgtaaagtcatccagaaactctagaaagccaagagtcaacaaacagtacttttgagctattttaatgcagggaatcagctctccagattgccctctctcatgtgacctgggacatctatgtgaacctttcagtgctgttcttcaaaacaacaaaaatcgccagggctcagctcccatgagattgtgtcattaaggccagctagttaagtgaaatacaagattcttttcttctacttccaatataacacttgtttgagtattttcaaaactgaaaaggagaaaaaaatagaacagagtcactgtatactgctatgtagaaaatatgtccttttttatcttttttgaaatctctgcgtgttaaatcagtgtagagttctgatgttttgaaaactgtaggaatgtaaaaattcaggtctatttagtcaaggttgtagaaaaaacggcatagtgaattgctagtagctatttttcatgcaaaatgattttacgtacaaaagtaaacttcctgaaatttgagtagactattttcttattctcagccttaggcatagcgatctccatgatggcatttacaaaaggaactttaaatgcttagagtacttcttttagaaagggacatagagttttcgtattttatttttccagcttcatatttccctttgccagcagggcattttctggcatctttgtgctcaccatataaagctagcagatggcatcactgtgagatcctacctgatataggccctccagcaagtgaagaaaaaaaaacctgtctgtcaacatgtattgccatatacagtgataggacttacttagtaggcttccttgttgccatcagcacgtccaggaaaacatttttgcacaacactatgttgtattttctgttgctttggtacagtaaaagaaatgaggtttaatgaaagagaaatcagtcctttataaaaataaactttcttgaaagatacatgtttagcaactttgaaccagcaaataatagacctttgcttcaccactgcaatcccttccaccatgtcccgtcctttgactgaatagtcaatcaataacctcaactcttccatggagaaagagccgagaatgaagagctgactcataacgaagtcaagtggcccttcatgttaacctgtatttggggtgatttttcagaataatatattctcagaggtcaaaataaatttagatatagcacaaaacccttaatgtccagaggaaaaatgcagtgaccacatttctggggaaaaaaagatcaggcaataaaatctaacccaaagctcagtctagtaagtataagaatgctttcgtatcagtcctaacagaagtttttaaatcgagatctgtcttggaacgtctggtgtgtttagttactataagcagaatcatcaagcctgttgcccaggtagctctcagagagttggggtaagatcttgccaagcaaaatctgtgagtacgattataaaagcatgtgtctacttttacaggtatccagaaaggcagagctctatccaataggctacgttcattcattatttcattctacaaatatttgcagttccctagtgttattatttattgagtagttgttatattctaggcattgttctaggtcttgtgtatacattgtctcattcgatttccataacaatcctatgatttagatataattatgtcactttagagaggagaaaactgaggctcaagaaggtgacatgacttgcccagattcgtattgctagggtgtattaagcagcaatttaaggaaccaagatttgaatcttagttcaagactctacattaatttcatctttccactacagcctactgctcccctcatgtccgacgcctggatccgtaaggacttctactctcaaggaacctacaattttagccgagcaaatgttgtatacactctgttatcatattagcatttttgaagcaatatctacattcttaaattttccgtaggactctgggatgcctactacattcagtattttagtagcttagactagtaaatagcaaatttatttctctagagccacactgatcagaatacaatttgagtcaaaaatattccccagttaattctgaaaacactgtcttacagaacattcaataaaaagcatctaaggataatgatcattatctaccaaaaggagttaaacaaattagtacaacaataacttacattaagtgaactttatatatttgtgcaaatatcaactctctagtgcagggtacagctataacttgaaaaaataaaaccatagcatctaatgttccaactcagcctaaattcaaacacaaggccatatgtttacaaactgcacacataactaagtaaattgctgaaactgtcatgaagccatagcaaagagtcagaacattttatcacagaatgggactctgttattaagaacataaaatagagaaatgaaaacactgagaagcgatgttgattggaagccagtttgtaaccattggacgctctcttcattacagacagtcgaccggcccaaggactggtacaagacgatgtttaagcaaattcacatggtgcacaagccgggtatgtctgctgctctgctttctgatgaggtccttgtgggttgaagggactacattcgtcttttgcatcggtttgattcacacacaatgtcaagaccccagcaaactccgtgtcccctttcttttcagcatgcctcctgttctccttctgtcacccctccggtgacagatccctgtgcctctgcctcccacctgagctgccaagaagcctccccatggaggacaaccaggcactctggcctcagccctccatcctcccctgtccacagtctaaattggtgtgttgcctgggtgaaaaacacattgttcctctgtccacccctgtctgctctcatcaggagagtgagcctgcgcgggtctgcctgagcctgctctgtagacaggagaccactaaagcacttagtaaaggaaatttgcgatccagagcagagaggtttctggggaagcgaggacaagggcctgactttgcatgctacgaagagggcagcaagacgaatatgttacagataaaaaagggcagtttgcagaggcctgtggtggcacacacctgtaatcccagctactcagaaggctaatgtgggagaatgatttgagcccaggggttggaggtttggaggctgcagtaagcaatgatcaccactgcactccagactggacgacagggtaaaaccctgtctcttaaaaaaaaagaaaaaaagaaagaaaatggcattatgaactaggaaaaatacgttgcttttctaacaaatttctgttgtttgtctgaagttctgctgtctcgttgtcctttggtgacaatctatattaccataatatttatgtttcattttctagatgatgacacagacatgtataatactccttatacatacaatgcaggtaggatgggtttccttgctcgcaatgactattttatgctcagcaatgtttggaagaacgacacggtcaccttttttccccttctgtttgagcacatgttttcagttcatatattaggaggaggatttcttttcttttctcagagcgtgcataacaaaaggattgacttttctcatggaaatgagaactaatactggtttatctcattcattcccactgttggtttattctcagcttcaggaatgtttaaccaaagtgtgaaggataggctgaaaggacacactgtaacccagggtacaaaataagataaagatcttttatcagcagagagaatgattacaattgtgtaagatctttcagatacacttcaccaaaaacaagtcaaacaaagtattctgtgaccttgtccctgccttttgctccaaaatgcaaccattcattgaaagagtttaaaaatcccccttggcggggccacttttctgactcagaattgccagtggtcacaatagaatggcttcagttccaggcactgccacttggattggcgagccttggtatctcgtgcaggggtctgcaggctggaaggagggacccctgacaaatgtttttcccttcatcactttctcctgagtgttgcctcgggattctgcccagggctcctctccctgcccagtcacaggctcaggacaggtgcacaactattttttttcttctttctttagaccaggctcggaggctggcactgctcccctccccttcagcagctgcaacctcacttggggtcctctgggcagcctggggtcgcatgatcctcctgttctgcacccctggagaccacattcaggccctttaactatttgggattgtgctcctatctccaaagacaaattgatagagggaaaatcagtagaacaaactcagcaagccctctgggtttaagtcttggctcgccccactgatagcttcaggcccacaaagatgtttcccttaatttcatccctgctcccacgcccaccaaactcacctcctttatttagctcaaaagttgaagtccgactgttgaatccaagcaaaactgtaagtgtagatgttgtctcttttcatttgctgtggaaatgtgcatggactttcaggagaagcgaacgggtacaaatagaattagctccaatgattgggtgcaggaaaatttagaatttttataactgttttaatattgaggtttgtgtcacattagtgattagtgaatggaacagcagtgatatattactttgtacagccctacaagctgatcatttgatcagtggacgagtcaactgcagctagtctctttgctctctactaaccgtgcaagccatggcttcacaccttgcacttttctgcctttttttctataccatccctgctcccctcttgccctgctcaccgaaactcattcagggctgactctggactcgtgggttccataataccttctctgagcaatctaccacctactagcatcctttaattcttactatgtgttttcttcatttggtctttattatcttttaccaattattttccatcataattctatttgtgtctgattttcccaggtgcactctaagcatattgaggactcatgtttccttgtaccttgcacagcactttataaacacaactgtgtgcaatattttgtttgactacaattagcatgtcaattttcatatgtaaatcagggtttttaaagtattagaagatatttggaaacagttccgtttttaatcttgctctgaaaactgaactattttcttagtgtatacaattgaagagaaaatttgctgagtgcttataagtctattcctagtaccagtctgaattattactagttctgaaataattgacaaagatttactgtaatcagggcttaggtacagaataaatttgtaattaataaattaatggaaattagtacattaatattaataaattaagaaactaccttctaatgtatgcattatgaatatgcttattgataataatttctatgcaatcattggctattttgagggggacaaataatttaattcatttttaagaggtgatttgcttctgttttttgtctgcttttgttttttgtcatgataggtctgtacaacccaccctacagtgctcagtcacaccctgctgcaaagacccaaacctacagacctctttccaaaagccactccgacaacagccccaatgcctttaaggatgcgtcctccccagtgcctcccccacatgttccacctccagtcccgccgcttcgaccaagagatcggtcttcaacagaaaagtaaggcatttccccccagggtggcctatgtttcgcttaggataaaaataagtctacatggcattcagtagaagaatcagtgcacctgccacagagagagcggatgtgtaatcttgctagtctatacatataccatattgacctcctctgctgggattgtagcaaatgttttccctgtcttctttcatgatactggagtgccctaaattagacttgaagtaatatggacacattttctgctttttgatcaatacatacatataagagacaagtaaatagaaataatggacatgtacttcctttggcataccaggttacaggctatgcagttcattttctgtttccccaggtctattaataagagacatttttgaaagcagggaaagttattcaaaaatcataatgaggcattagttaataagtgtctgtgacttgtttctaccagtttttcaagctaatacgagttttcctttctccactgaaatatttttatacaaactatctacatgaaaataaaaatttataaacacttttttattgtgttatttttactgggattatgactaatacttctacttataggtaaccttcattgagcgctcattacaagccaagcactaggctaagtgctttttctgtgtcatatcatttgattccgagaacaacccagtgagatactttctattttaaagaggaagaaactgcagtttagaaaatggtaggaacttactcagctcatgcagctcgttatgtccaagccagggtccaagctcagctctgattaaacccaaggcctatgctatcctagcaattaataaataagaatataaaaattatttcttattaatactggttattaagtgttatcatacccattccagaaaaattgtattcaacaccctattgtaccattaagagtaattgatgatcaggccaggcgtggtggctcatgcctgtagtcccagcactttttttttttttaaatggagtctcactctgttacccaggctggagtgcaatggtgtgatcttgtctcactgcaacctccgactcccgggttcaagcaattaccaagtagctgggattacaggcaccagccaccacgcccggctaatttttgtatggtgtttcaccaccttggccaggatggtcttaactcctgacctcgtgatccacccaccttggcttcccaaagtgctaggattacaggcgtgagtcactgcacccagccagtcccagcattttgggaagccatggtgtgtggattgcctgaggccagaggttcaagactggcctggccaacatggcgaaatcccatcttcactaaaaaaaaaaaacaaataaaaattttataatagagtaattgatgatcatatagggcacagcatcccaccaaaacacacacatcgtgtgtgaaaggggtctcattttaataccaatctcctcaggatgaattatgtgaggccttaaaattgagaaacagttttctagacacaaattgttatctttgtcatcaaaaaataaccaaaattaacgttttgatttaaaggtattacccatctgatatgttttgttaaaattaaatatctcattaaaacatatgataacctcctaaaaaattccatatggctttcatatgtattatctcatgtaatgctcaaaactcctctgcaaggaagaacaacacattattgctgtctgtgttttacacaaatggaaaaaaatgaagactgagaaagtttaaggggtcttgctccatatcagtcatgaatttagtagaaagctagggcttgtccctaattctgtctcttagagtatttctatttccaacgggccatggagcaagaatttcattccattccatggaagcagaattacccctatctacagtcagaaaatccttcctcctaaaaatcatggcccctgggaggctgaggagagaggatggcttgagcccaggagtttgagtgagatggcagcgagctgtgatcacaccactgcactccagcctgggcaacagaggaagactctgtctcgaaaaaaaaaaaaaaaaagaagccttcttctttagctcagtagcctagaaaagcttaattttgtgaaacccttttttgaagctttccttcgtaagtcttctgacagcctcttggaagatattccttgggggaaaagtgctggttcccatgaatgagatgtttgactctggtttttcaaggctcacaccaaaagacgacctcctgttccacactgcctgctctggtgcacgccaacccacatgacacttctgtgctcttcccaagcgatgatcccacttcaagaaataagatcaaacatggtgtgtgcattactccttgtcactttggatcaaggatcccaaaggtcacaaagtggtgggttaaatgctcatagttcagcagagcatactgccacctattttaagcacaaatatacacagctgccattaggaacccagggactcactctctgcgcgtctacaaacccctcatgtgacttttggagccagtggcgggggaatgtggtatttttcacaggttaactttttatcctgagagattttttttaaaactatgctaaaagtaatgttgaaaacagataactggttttacacaattgctttaagcaaaaaggattattttaatgtgtgatttattgtttatttctaggcatgactgggatcctccagacagaaaagtggacacaagaaaatttcggtctgagccaaggagtatttttgaatatgaacctggcaagtcatcaattcttcagcatgaaagaccagtaagcacttgtcattaaacagaatatgccagctcgctgggctcccagggctccccaataaacctgaatttcagacccattagcaatttttgtcacaaaggtaatcacttagaaatcatgtttattttgtataatgatttgtacatctcatctcagaattgaaagatacatgttctaatatattgtctttactgaccaaatacaagtgtatgtgtgtgtgtatgtgtgtgtatttatatatatatatatacacacacacatgcaggtgtatatacatacacatatatacacatgtgtatgcacacacatatatatatttatatgcaagattcatttgcatgtaactctaactgtgcctaatcattaatcagagtttaacttttaaaaaagttcataagtgcaatacttaattgctatcatagcttgctaatgagaaaaatcattaattaatctccccaatatacatggacccaggcagttccatcccttgttttccatattggctttttaatatttctttggatgaagggagaattttccaaatgcccttttcataacaagttgttttaattgcttcttattaaatccctcctcaggttaccaagcctcaagcttcctgattgattgtcattctaatggatcaagattatatttcactttgcaggattttttccaattatttaattatatgcaaacaaaaatatctatacacttaagaagaaccacttgcctcctcgaagcgcaggttcacacataggtcttcccttggccttctttggttttgattccccaatactcccttgcatgtcctttgcttcccctcagaaatcagtgtcctcaggattttctttgaaactccacagttcctctgcatctccttccaagcctacttctaggaaaacatttgcaatcaattgcaatttactctcatttttgctttaaaagaattttaggtgtcagtgaacaggaaaaagagagttttctttgtggagctccttcaagagtctccaagaaatcacactcatatataatccaaggccagccctgtggtttaattggaaactctagccttgccacacccaacatgagtgtccttgattgagtctttgaaaccctgtgtttgcggttgtgttctggagaagcatgttcaaaaccttatcatcagataattcatacatgatatttgtctaagccttcttaccctttctttaaataactcatatcttttagagtaacaggactacaaaagaaaaactgaaagaaaaaaaaaatcactgatttgcaggcaccattgcaaacttgtaacccatttactagtttctgtgattgagtatcatgctactctgaaatttccagaatgagaattgagtgaaacacaatgtcatcattgcagaaaattgaaaacagtgaaataatatatctcagatttaaattaaataacaaaattttaatgatctttctagtaatttatgagactcttaggataacgaacatggtaatggtattggaatgctttggtagccgtggtgtcaggaaacaggattggttttagacgctctcccaccacgatgtttctattatttagtcattcagtaaaactgactgagcaccagctacatgccaggctttatgtgaggtgcacagcggggaacaggacacactctctaccttgaggaacttcaagtctatcatttaatatctatgcaagactagatctgagtttgtgcaaagtaaacagcctcttatatggttaaaacagacgcacacctaaaaaaccctccctttgctccctttagggtttatacattgaccctatcattgttattgaaattgtcacattactcttgtctttgggttaaaaaagactttaaagactcctcgttttacaatagcaataataatagcaatagcaatcattgtaaatctttattgagcactcactatatgccaggcgctgtaattagtaatttatgccttatctcatgtaaagtttccagcagccctattaagcagacacatggcatttccatgttacagatgaagagactgaaacacacattagctcgccttgccccagggacacatggtgggagccagaactaggagttgagcccaggcatactgatgcctggtgcacttggtcgctgctgtacagccactccaggtgtggctgagcaggaaacacattgaagtagcagttatttgattcccttatttgatgattttgcagtataaattaatttatttattggctaatttacaataaagtatacttgatttactttatcagaaacttaggccctaagtagttaccacacaggaccagtagatgtgactggttgtaagacaggaaactctggagccatgagtgtgacagagattcgagtgtggataggtctctgcagccacaggagaagataagtagaaggaacttagaaacttggaaggaagtgagaatggctatcttatggagaaatagaaagaaccaaaaatgttaaccctcctaaacaattttggagaggaccagccttaagcagaatggtttgagctggccatatgggacatgttggccagcctttccagtgtaggaccagctcatcatctttttaaaaaaattagtcctgacttcgtttcaattgcctctataaattagaaaacaaaaagagccaagtgggccgtggtgatgtagagactggccgcgtactgatatagtttacataagattctgaagtgttgaaaatacaggctagaggttgaagagcaggcgtgctgaatgagagtggcgtcgcagcgatggccagcgctgaggggtatcaaggtcttattcatgcattctcatgtcttttgactccaagatgccttggaagcattcctttgctcttttcattttcaatttttgaaaaatatacacaacacctgggcaattctgtgttgctcttttgaatctctacatggcctctccatctgcccacttttccaaagggtcatcttgggttttcccctctcctgcagtggactcagtgtcgcctgccaggagaagtgccactgctgctcctctcttctggcccacaattgtccgtgcctgggctacagtgacagccacctgattcatttccctacctctccagtctagtctccacaccacagcgaaggcaatctttagaaaatctttataaaacctccagctcaaaattttctctggctcttcactgtccttcgagcaaaatctgaaaccctgagcataatttatagaagacctgtgactgggctccagctgacctctccagcctcatctctcctcccaccctccctgcctcgctaggttccagctgcacagagaactttcaattcccgcattgctgggcctctgtaaaggctgcacctccccaccaggaaaagctctccccaccacctcttccttcacatggagaattctatcccatcctccaggtcccagcacagtcccacctcccccagggaatgtgcctgactcctctgcattaggttggaggctctccctgctgtgtgcccatggcacactgtgttcctcatgagatcttgagcttcttgaaggcgagggctgtgactggtccaccagttgtatcccaacacctgggacgatgcctggcctgtagcaggtgttcagtgaatatgcattcgtggaatttctaagtgaatgaaggaacacaggtttcacccttgcagtcagtggaaaaagttggtgagggactgaatccttgttctgttgtttatccatgaagcctatatatttctagtgcaaaaggcccagtgggtctcaaaacattcttggaggggtttgacacactgctattagtagtgactcataattccacgattccctgggatacagagaaggcaggggggtagtactgtttgaacaaaaatcttcccaagaccctggcaaagagatcttccttaggaatcagtggcatatgcgtttatgttctttaacagggaaagtaaaagtgagcgcacttttttgaagctcataaatactcatgtgactgtaaatttagaaatgttaattaattgggcctaatgtttgatctggaaaagtacttagcagtcaccaggaatttgccttgaactgactcgaaccacaaatcagaaccgtatttccacaatttaatttttccatgagacaatcataaaaactctgctgggattatattactaaaacctttatatcccattgcattggatatgtttgtaggtgagtaatgttaaatttaaaaaaaaaaattaataaagcatttgtttaggacctctgtatgcttgataaagtaaaaaaaaaatatatgaaaatgttaccctaacctacaataactaaacttgaacataatgataaaagcagaagaaaatagtcattgaaaacactgtagcagagttgaaatgcaacttaaacccttaatgaacttaagcttctttatcaataaagattgtcagtcaatacttaactataaaaatttaaggagtttcatctgatgaccattaagaattatcccaactaataatgtatatagcatttattgtgaaaccacaataaatataaaacacggtagtcaatgtcattaaaacttaaaatggaatgagcgtaatttgaaaaacaaaatagccctggcacttctttttgtttagaacaacgtatagaaagcacatgcctcactgagaatacttagtggaatctcgataaccacaaaagcaattaaatgcttttaaattatagaaaacactaaaatttttaaagttgttcacccttggtagcttttaagtaaggatcacttgtgatttatagttgtagcttttcttgaacacgtcctcttgcactgatgactaacaaagttagttttaaacggaggtttgctggtgggtttttttttttttttaatgaaaagaaacaacaacaaaaaaatcacaccaaggctagaaagatgcatatcagtatctttgctcttttgccttttatgagcaattagagtaaaccataatcatacctcctaaatgagtttctgagtgttaatattagtgctgtactcaaaggaatgtccatgttccacatggaaagtgttaaattactgagattagtgatttgtgtgtatatccatctgttgactgaccatctgtatgtgtgtcactgactgttgcgaggcttctgtgttccttagcagtgcctccaggtcaccataggacatttaattattgcatgacttaaaagattcaatacggcaaccacagcaaagagaaaattctagttctgccactaacacttcctttaacacaactctgctcaaacatgtgcctttcattgcattccaaagttatcgataattaccagctatcattgttttgggtgttttctctgctaatttctattggcatgcattctagatagttgcccattgtaactataaattgactatttaaataaacaaaagcataattcatggaaaactgccattctaaggtatgatgcaagatggtagatattctgcttccttttccatattctatcatagagatgcattactataaatcaggacttggtatatccatttgttacatattttcttaatgtgggagtcaaagtgaagctacatagctaacaagtcttattcatttagtaagttggctgccctctgctgttcataatgtttcttaaacagattcgtttcctctaagagaagtttctatctccccttggcaaaacaaaatactattcttgaaaacagaagttataataattaatgatatcattcagtgtgtaacattagaaactatgaagtttaaaagagtcagaggttagttttcctgtagaagaaatagtatgtctctctaaacagaagagaaattactggaaattctctctcctgtcagttaccctaaaaaccagctccagcaaagccatttcacgaacaattatgcatctataatgatctaaataataattggagaaaaatagtattttatggacattaaaatctcaattaatactattgcaactattgaatcaaatataaattgaattaaatttttaaattcaacagaaaatagcaaattggttactagaatattttgtctctaccaatttcactattacttctgaggtgtaaaccaaatataatactggcataaagaaggaaaaatatctcaagatttctaggcattttcctatgtctaatagtaggatgttctctctgaatttatttattacaaaaataacattacaacaataaagcaaaataatatttaaaagaaagaaaaaacaaacagtcgcaataccagaacaccattgtagtcgtttgtgtatgtgtgacttctttactgtgttcatgcagagacaagctttgtaatacctttgtaactactgtacaggtgcgtggttagattccgttttgactgcttggtatctcattgtaagcatttcccagggacactacacagtctttataattatgatcactacatcttttggataacttaggcttttgcactattttgtcacgatgcctcaaacttttctatcattgtctgtaattactcctataatcttttattataaaatattgaaacaaagtcacatcactaaaaacactgtgagtataatttattagtaagtgtagactgtgtatcattagcaaaacttgtaaatgcaacgagtcaataaaacagtagaacaatgtcaaaatcatggcttttgttggaatatggaacatttcaagctcccagcactgcgaaggttacatagcatttttttcacaaccaagatgtcgctattcagtttaagtccctgagtttctttaagaattgtaagcaaatgatattgaattgttctgaagcagtgagcacttaatagtcctcctagaatatgtcttgggagtcacagctcctctcctagccagagtgaatggcttttagggaaccatataatttttcttagaattttttttctgacttaagatactgtactcttcaattgtaccacatttaattagtgtcatatagtaattatcaaagaagtaataacttgtatatagtactttaagctcttagatttactacaaaatcagcagcctaaatcaatctagtcagccatgtattatttgaaaatattaaggacactgctgggtaaggtaaacactctacatctgttttctattactagaataattgtatgtattttctccaactgtttatattaacactgctagttttttcatcttaaaaacaacattcagaaacctctgcagggaagcaggtcaattataaaactggctttttctctaaattagaacatcgaggaaaccaagatgggattttaccccaggctccctccccttccccgccatccacggtattgtgaagaaccagatccccttctcagctcagagcaggcagccgggaggtgaatcctggggatccactcctggtgggcagggcttcgcagcggcccggatcgctcccgaggcgtctgggtccctagggacacttcgccgtccggaggcctctcccctcccggcctaacgcaggcacagcgcgctgccagggtgtcctcgcggttccgcccagagcctccatctaatgaaccagtttctgcacccctctttcttgcagccccctctcccaacaactccgacacctgttccaagggaacctggccggaagcctctttctagctcccgactcggagaagtcactggtagcccctcccctccgccccggagtggcgcccccacaccaagctcgcgcgccccggctctgtctcccacccgggtgagctccttccttccttacctttcttcatgcccggcagaggtgcaggtgcagcccttgcttgctcagagcctggcgactcccactcccccgggtcccgctcgcacccatccaggccccagaatcttctcatccacaggcccctgagagccccccaatgccctgtccccctccccccagctcgcctgtcttcccacccctcccgcacccttccccatcccaggcttaccacctgcctgcacccgagtgaattgtctgcagactgcgggctcccatgctgggactgctagccaccaatgagggcagggacgatgaagtgactcgcccaaaagagctatttggtgactgggttgagcctattccaaacatcaggcgtgccagccagacccagtctcgctgccgcagagagtggtccatagttcatgcctcaagcgtaagtggatcaactcaagcaagagttgcccacaacttatgccaatcagaaacgatggacgcaggaaacagctagggaccccctgccatggagctcgccttcacatcctcatgctactcgttttactttacttcctccgttctctcctgctgaggttcgtggggtgagagttgatgcatgtttgcgtgtcaatgcgcgcgtgagtttttcatgccacacagcgtttccctcactttgctcagtgtgccttttccttcccttttccttcacatctgctctagactgatcgcataaatccagatgacatagatttagaaaatgagccctggtataaattcttttcagaactggagtttggacgcccggtaagtgaggctagactattaatataagaaaactaggagtatactgtttgatttctaaaatacaattatcagtagacgtgggtgtcattcagagaacaaaggccgaatgcataatgtatacacacacttggtacagcgtagtccagattcatttctgtaccaaatggtcaaatgtgctcagacatttcctatgtggtttgtaggtcattcattaagatttctttacatctaattcattacaagttcaaaatcttgaggtagtttctgtgatggaatattcagacaattattacagctgtatagaagatttgtatttgtttacagtctatttggtctagttcaagcagaagagcaccttgacattgagtcctgtttgctgagcaaacatcaggcacctggagagtgcgggcttctgtcttcattatctcctcgaggcctcctgatgtcccgccaagaagaagaaaatggggactggaggggttaagtaatgtgcacaaaatagtaaatggcagagtaagaagttaaacgcagagcctgttaaagaaaaatgaaaatctctgggcagttctcactataatatactgccagagtaatcccactacaaaatacagtcacgtgttgcttaaggatgtggacgggttctgagaaatgtgtcatcaggtggacttgccattgtgcaaacatcgcagagtacttacacaaacccagatgctagagcctgctacacgcctaggctgtgtgctatggcccgttgctcctgggctacaaacctgtacagcaggttcctgcactccatactgtaggcaactgtaatgcaatggtaggtatttgtgtacctaaacatatctaaacatagaaaaggcatggtaaaaatacagtcttataatcccataggaccaccatcatatataggtgcatcgttgacggaaacgtcattatgcaacacatgactgtacctagtttaccattagggatataaggaaagaaaaaaatcaggaagtcctgtggatcttaatttccagacttgctagtgaaagccatcacagcttctctaatccccagactcccgccagaggaagcccagaggttgggccttattgcttagcctgtttgggataaagagtcaacttgaggccgagcacggtggctcacacctgtaatcccagcactttgggaggccgaggcaggcggatcacgaaatcaacagattgagaccattctggccaacatggtgaaaccccgtctctgctaaaaatacaaacattagttgggcatggtggcgggtgcctgtagtcccagctacttgggagaccgaggcaggagaatcgcttgaacctgggaggcggagattgcagtgagctgggatcacgccactgcactccagcctgggcgacagagtgagactccatctcaaaaaaaaaaaaaaaaaatagtcaactggaggttcagttaacaacttccctgattaggaactgtatccaccaacagcagtgcatttgatgtgtgtcagttacacacgtttttatgcgttttagactcttaaataacctaccaattacactgatagtttttttagaaatcaggatataaccatttctataccatatgctgatttatatacttgcatatggaccatatatggtttactgattggtgatggtagtctcttttgtccattaaactgcaaaggagacttggttagactcaaggtagcttattgaactgaatcaaaagtgactgtaaacgaatataaaccaaaggatttttcttagggttattatctcataggaggaatgttttctctcattttttctcatttgtatcttagtgtgaatgtaaatgtattttatttcaaggaaaaacattctctagctttattttatatgtattgttgctgttggttagaaagtttatagggacggccaggcgtggtgactcacacctgtaatcccagcattttgggaggctgaggcagacggaacacttgaggtcaggggttcgagaccagcctggccaacatggtgaaaccccttctctactaaaaatacaaaaattagctgggcatggtggcgtacgcctgtaatcccagctactcagggggctgaggtgggagaatcacttgaaccctggtggcagagattgcagtgagctgagacggtgtcactacactccagcctgggtgacagagtgaaaccctgtctcaaaaaaataaaataaaataaaataaaataattcaaaaagaaagcttatagggactattctgtactgagcctaagttatcagcattttccataatcattttcagtcacacatggaaactcaccagcatgctatccacttgctcctttaatgtttctttaatttaccttgcattcctctgtggccagagactaggagtgctaatgaaatttgacaaaatgaatttataaatatactaattgaacactagccaattttcccagtgcttgagaatatttgcagacgttgcacacttcctcccagctgcccccattttgctccattcatgtcattctgtttgtgtagctggtgctgtcaacactcaatttctaactgttgtcaccttttccacatgttcattccttgctgccattgactctcctccattccatccctacacttctgcttctgtggtgcgtctacacccagcctcctaaaaagcctctggactatgttcaagatcattcttctggtgttttcaatgaggtaaaaacacgttattctctctttttcagatatctcccttagaggctgtgactgtgattctgcacatctgtgttttacaattctctgtaatgtctaagctatttttgaaaaaatatctatctttgcatcattatgttgcatccagtatcattgcctggacattaattataccagagttgttggctatctctggactctgggtgaagaatcattccaaccacaactgctagttatactattctatgtagttctggtattcagcagcgtgaaaattaaaaatcaaaagtattagtcttagtgcatatattaaccacctctttttatgagacagagtaaaatactacaagaaggcttcttagaaccattctattataatgcttggagtgtggataatcagatgcctatgtcccatatatttctaaaatttatttttgttctttcattttcctaaatacaacttacggattgtattatcagtcaagaatagggctggcaaatacctggaaattgtgtatcacaacttcccagtttcatacccatgacagacatgactactccttttcaacactgtaatccaggcagccactataacaaattatcattggcatataaaatgaaatgcgtttgcaatctctacttaagagcctataataatcaactaggtgaaaaatttatggcagccaatgtatatttttatttgaatcagagttttatttgaaagagagaatgatacaggcagaaatgattcagagtcaaaagcttgttaacctgctctctgcaaagaaaagcagaaaattactttagaaagtggataaatgactcattagaagacacaagcagaaatggcactgttttgctagccatcagctatataaaagcctccttgcaaggaactcttagaagcaactagcatgggaacgaagtaaataaactgttttttgcacattagttgctctgtggtcttaagtgaatactataacacaataaatatcttattttcattaaaagtcttaaatatgtgcaactgggaaacacaaccagtagaaccgttgtgttgtaggaggtactactgacacatagtggtgaccactggaattgcaggtatagagtctcaagaaaatatgcaaatttctagcgtctcaacttgcaatttcaaattatttaccctgtggtaaacatcagagtgtgtgttaaaactgagaagtgatcaaaatatttatatattaaataaaaggtaaaatagagtaatcaggaacattctgggttattgaattcagttatttctaaaggcttacattttatagccaggcaggcaggcatgtaatctgaagaaaatcaaataaaacaaggggttatattctgtatgttatgttaccttaatatctgcagaaagagtcttatttcaacatatgaacaacccaagaatttattttgaaattcaatgtggtcagatatttttctcagatatttctagggtgtttttaaggtagttggttcatagataactgaaatggaatttagagtgcatcatgtccaattcactcatttttcagttaaaaaaaaaagtagagtgcaataattttaagaaataagtccaaaatcacatggtaagatagtggcagaaaaaaaaatatatctctcttaaccttcatttctgtgctatttcctttatatcacacttttcagcacttccaagatatatatttagaggataaatcttttaaaaacaaattacttacttaatattatttcttgttaactattgaattcctgtgaaaagagttctgttaattaatattacacaataattcttgggcataaaaatagtagaaacttaactctatgcattctattatgtgatggtagtggcaaaaaaaaaaaaacaacacataaaaagcactttgccagtagttgatctatttgccagttatctctgggattgagagggggtgctgtatgattctaatagcatatgttaactatgttattaatttcacattatagtttttcagaatgtaagaaaatatattctcttaaggttctggattttgtctttaataaccttttgttattaaacatttctggtaaaaacaaatgtaattgattagacattaccttagctaccgtttatcaactgcctggtatataccatgaataacatagattttaatccataactggaaaactggcattaatgaagaacagttacggatatttaagcaaaatttaatctcatagctacttaacagaaagagtgattcagtatctgtacttcactaaattgaccttctaagtgtgttaaaataatggtaatatgtaaatagtagatcataactggtaaaatttgtaacctcttttctggagataattttcattttgggatgagtacacttcttacaattattgtacaagtttttctctcagtcatcaatctagattttttactcttatcttacaatttaatactgaactttctctgagtgtacatgaaaccgcaaaactggttttcatttattttgaatgtagaaaccagtacaaggagaaatagtagtttcttagcctaaccctaaaacacaatcagttcttacactatgttttatttcacattacaatattgtttaggctcattataagttgacaattcaaattttctgatcactgtagggttgttctaagagtgttgtgaacttcacactttttggtgatcagctgtgtgtgagggtgtcccacgaaagccgtgatctgcacagacgccgatgctctcaggctcttcagtgtcgctcttctgcaaacgagtagaattaatatttcttaattgtaatataacgatctgattttattttacttgtttgctttctttcatatttagtatctatttttctaccttcccagtgtctgattcagagctcagcaaattaaaataaccatgtacacatatcagactagcaaaccaaacttttctcctgattttatatttgttgagaacctagaaatctaaatattttctaggaactaaaaatattacaatccactttttctgtctaaaaggaggatgggaatattctcatgcagagatgcttttgtttctagacaagattccattttcatttagtaagatagaattaaattaaaatattagttaatagaagcgtaagttatgcaaaagggaccttgtaagactgatatacatacagaattgcaaaattgtattgttttaattgattaattggtgctaatttaccaattaatagaaaactgagttatagaaatagtttgtaaagtgagatttgatttccactaagtagatgtttaatactctgataaaatgtttctagatgatggcaacttaagacaacatttgtcaaaccttgcctttctggctgacatttttaagctttcatacagacaaatgtttttaaactagaattccagttcttcatcaaaccaaattttatctgtgatgaattgatcatcaaatatgaccaaaggcaaaactatctatacttggtatacatctccctatactttctttatacttttgttttgttttgttttgttttgtttttttgttgttttttgtttttgtttttttgagatggggtttcactctcatggcccaggctggagtgcagtggcgccatctcgactcgctgcaacctctgcctcccagattcaagcaattctcctgcctcagcctcctgcgtggctgggataacaggaatgtgtcaccatgcctggctcgtttttcatatttagtagagacagggtttcaccacgttggtcaggctgatcttgaactcctgaccacaggtgatccacccgcgttggcctcccaaagtgctgggattacaggcatgagccactgcacccagccatctccctgtgctttctggacatcataccacagtgtcacctcaaacacttgatagctcagtgtcctctcttgccttttagatattttagcaattatcccagcagatgccatggaaaataaaaaattcatattatcatttttgcttactatctatttcagtgtattattcagaatgaaggaaaaatttaaaagcgcactttaaaaaagttatattttgcttcattagctcatttattttaaactagccctgaactcacctaattgtaaaagtataactatttacctgattgaagtaccaggtactttatttagtttcttcaagtcaaactctgtgggttttatttaaacgtcatgtctatgttgacagatgaatggtgtcttaagttctgcttatgtgttacattctgaagacaatacttggtaacaacaataacaaaaactttaaaatgtgatgttttataaggattgaatgatgactacaaattttttaaaacatcaaaccattcctttctgtaggaaatttctatttacagtcaacaggtaagattctgcagttcaggctgtaggataactttagctcttatttcagtgtccctgagaaaatattattaatttccccccatgcaatgcttgggttgtggataatttgagctacacagagaactgcaatgcattatatcagaagggaaagcagataggtcccaagtagaaatcaggtcgcatgatctctctttgggaagacatttttatagtcataatgaatggtactttcaacctcaatttttataatattctttttaggatacctaatttaatgttgacaagtgaacaaaattttgccacggtaaaatttttcatggtactattatcctatcttaacaggcctccttgtatcagtcctctatagacagaagcctggaaagacccatgaggtaagaatcttattatgttgtagcagaatattctataccagtggtttctttttcaacaataaaattattcagtgaagtagtaatgagtatcatgtatcactcatttttatttgaagtaccatgcctcatgaagttgttttattttgtttcagcatcattttatatgatcatttcaagaatttctaaaaaattagtgaactaattataaattccttcacagactgagaaatccttctcttcccttagtcccctatacccagttttcttttctttagatgggaattataagtaactaattttcaatgttgttaaatggcccttataataatatatttgaaaaaaattatagattaaaaagtgttatacacgtatttgttaatcatactttgaccacacaaatcagaaatactgttattaatactaccaataaatgaggcataagtacaaaacatattcaatcctaagaaaacactatggttaaatactattgtccccactttatctctgaggaaagtgacacctaggcttagtaacttaccaagtttacacagttggcaaggagagagaaaaaaaagaaattgaggcaagatagcttgtcaccgctaggcctaacttccctcagagttcgcctgaagtaagttccattagctttaaatatcacactttttaaaaaatattacaaaattcatggccaggcacggtggctcatgcctgtaatcccagcagttgggaggctgaggggggaagatcatgaggtcaagagattgagaccatcctggccatcatggtgaaaccccatcactactaaaactacaaaaattagctagacatggtggcatgcccctctagtcacagctattcaggaggctgaggcagaagaatcgcttgagcctgggagggtggaggttgcagtgagtcgagattgcaccactgcactccagcctggcaacacagcaagactcagtctaaaaaaaaaaaaaaaaacaaatcacaaaattcagacatattcagacatagttcaatagtaatattgaataatacaaactcccagccatattgtaacatcaataacaaatatttatctagtagcattaatttacccttctatgtagatttctttgtgaattgggtcaatcataaattgggtttctgagtgccatccaactgcaataacatccctgagaaaggaactctggaacccctcctttttatcttctgcctctatctatgcacctaaaatatttgaattttagagttttaatctaatctacagattgccgtaaagacacacagaccctcacatgacaggacagtcccagcaaaaacaggtctaggagatgcatcctcttcagaagaggacaaaccagttctgaggtctgcctctccgcttgcttccgtacatcccagacacatgtattcactttaccatttgtaaaactgagataacagcatatacctcatcggtttgctgtgtgggctaaataagacaaaaacataaagaaagcacatagcattctgctgggctccataggagctggggttgctgctgttgctattatcactgttgtctacacaagtcttgtctaagaatccagtgatttcatgcacagtgtgctgtgccatatgtggcttcattcattaacattggtcttaaatgatactgtactcaaactcaaaaccatgacagaaactccctgctgttctagactattgacagtattttatgcaactgaggggaaggaatctttaatagttaatttgctgaccagattactggtactgattgattgactgactgatgagacagggtcttgctctgttgcccaagctggagtgcagtggtgcaatcatggctcactgcagcctcaaactcctgtgctcaagctatcctcccacctcagcctcctgaatagctgggactacaggcacatgacacaactggctaacttttttattttctgtagagacagagtctcactaggttgtccaggctggtctcaaactcctgaccttgagccatcctccagccttggcctcccaaagtacttgattacagacgtgagccatcatactcagccttcattcattatttaaataaaaaatgttggaattccaatataacatcttctaaagctaagatgatagagatgataggacaagctgcaggcaacccttgaggtgagagagattttcctctcttgatgtcttttttttttttcagttatttcctgtatttggtatgcccctctggatatattcatgttgttagaactccgctttatagagaaaagatacaagatacaaattatagcactgaattctcaatcaacatattacactataggagaattttgacgttcaaagatgtttaaaaacttaggttcacacaaaaaccagcaggtggttttcttaggagcattatttataattgctagaagttggaagcaaccaagatgtccttcaataggtgaatggatacataaactgtggcgcatccatgtaataatagaatgtgactcagcaatacaaagaaatgagctatcaagtgacaaaaaacacatggaggagccttaaaagtgtatcaccgagtgcaggaagccaacctgagaggccacattctgcatgatatcaactgggcatggtgaaaaggcgaaactgtggaggccgtgtggaaagatcagtgggtgccaggatgagcgggaggaagggagggatgaaaagctggaggacagaagctttttatggcgggaagactattttatatgattgacacattaatgatggacacacatcattatacatttctcaaaacccctaaaatgtttaagacaaaacatgaactcaaatgtaaactatggacttggggtgacgacgcatcaggaaagattcatcaattgtgacaatgtacccaccaaaagaatatgtaaatgataagggaaactgtgcaagaggaaagggactataaggaaactctctacactttccagtcattatttctgtaagcctaaaactgccctaaaaaaatttagttgtccgggcacagtggttcacgcctgtaatcccaacacttcaggagactgaggcttgaggattacttgagctcaggggtttgagaccagcctgggcaacatagtgagactctgtctctacataaataacaaatttaaaaaaattagccaggtgaggtggcacccacctgtggtcccagctactcaggaggttgaggcgggagtatcccttgagcccaggagtttggggctgcagtgagctgtgattgcaccactgcgcttccagcctgggtgacagagccagaagccatctcaaaataaataataaggtctattcattttttaaaagatccttctagagaaatcatgttgaacatcaagggatgagttcctagcaatgcagttttggggatagaggtttaggagttacgccattgtcactagcacgttccaccggtttttctggtgcacacccgaacctcctccagtgccaatcaaacagatctgattccttctttcagttctgcaagcatggccagtgacttcaggaagcggaggaagagcgagcctgcagtgggtccaccacggggcttgggagatcaaagtgcgagcaggactagcccaggccgagtggacctcccaggatcaagcaccactcttacaaagtctttcactagctcttctccttcttccccatcaagagcaaaaggtgagcatagtaaatgaaaacacaacaatttactagtttacgttttagcctagagcactgtgtgaaagctggcccagtgatagtggcatgtgccagctctcacctacagtgtctggaataaaatatagttttagaacaatagccttcttcccacccagactgactcaagctggcgagccacttaggttgcttaaagaactctgactagcatctgctaatgcttttttcccccaaatagatccctttctaaacaaattgaaagtatcaaataatgtatcatcaggctactaaaagatgtattttgtaaacattgacatatagtcaaaattttctaatgtttctacaactagcaaattagtcaaatttataggataaaaattacaagcagcaacagagcaaattgttggctaaaatatacattggtttggagggttttaaaaaattattcaattctagattttaaaaaaatccgacctattaatttctttagccatttgctgtatattttgggccaccttcacatgaacagtggagcatccacctcctgccatgtaacacagtggtcaattcacagcagctcacagtcaggactaattggtcccaaaccataatgatatcactgaggaatcaccaagcctttttttctggatggcccgtctcctctctgcaagtgtagggagctcactgttgaaagaagtcactccttctggtttctggaagaccatttagtggtattccttgaggacaggaatatttctgagatggagagtgaggattgaaccagcccctacagggagctagggctctaccaaatgtgggaccccacaatctcctctaatatcttgggattgaaagagaagagaaagagattttgaaatgtgtaaagaaattgagctctaatgtaagtttctataaaaccagaccaattcagctacacctatcaactatagtcactaaaaccattgccacatggtagttaaaagtggtagctgatttgtgtgcaaaaggtattctggtcgtgatgattggactctgagtaggtggatgcctagcccttttaaggccttgtaaagctgtgatatcagctgatggttcagggcgtgtgagccccatccatcacatctttcctctgaggagcagagatgccttatcagattcaactcacttattcaaatgaatatcttaaggtaacaagtaggtcatgaaatgccattgacctattattcttggatactagccaaaagttaaaagggttctgataaatgtagatatttgtttcatcacagggaatgttaaatcaacttcctttcccagacagtacagatctacctaatgtgcttatctacttttaaagaatttagagaacattgtaaggtataagtattgaatagagatattttcctccattagattttatttctaggaagaaaatgtcctattagatataatttggctcctcatttattagttgactcagcaaagcaaaagaacatttccatagctattcaaaattgaggccaaatgtagatctctattatcaaattgcaaatgatttttcaaagaactcttccgagaaaaaaagcatggtatatgcacctctgatgaaagttttgcattatattcagttttcctatgagaattttgtacctaataaaaggttaaaggtagagcaatttaagaggtaaattcgtttgtttaaagagctttagctatttttttctagaaaaatgttagcagcaatagttcacagcattttgattttgcaattttggagaatactttgccttatagcttttaaaatctaaaacccacaaaaaattatttgatatagtcatgagagtattaattcgatgtaaatgtataaacccttcttcacctatgtatcattacgaatcaaatgaggctcaaattccggccctattaaattgcgtaagggtataacacttttgacactaattgttaaaccttcactaccagatcatgctatcagctgaagcagcactattgtgttttggcaaacaatattgtcagaaaggtgtatgaattatgcagtaggagtaggtgtatttgcttacgtcggttgcttcttatacacagttttgtcaactctctctgcaaagctacattcactgaaaaagtattagctcgctttagaattagaccttcttctctagagttgaagctccatgtgtgaacaatcagcacctagattaaaacacactaactgctttctccttgctatgctgtctgatgctttactgacatgctctcctctctttgtgaaccttttaacttctccaaatgtctctcttctaccacgctgctctggattaaaaggtggggatgatagcaaaatatgtccatccctttgcagttactcagggctcaacggcaacccctccagtgagttagattactgtagcacttacagacagcacttggatgtccctcgggactcaccaagagccattagtttcaagaacggctggcaaatggcccggcaaaacgcagaaatctggagcagcacggaagaaaccgtctctcccaaaatcaaatcccggagctgtgacgatctcctaaacgacgactgcgatagcttcccggacccgaaagtcaagtcggaaagcatgggctccctgttatgtgaggaggactccaaggagagctgccccatggcgtgggggtccccctacgtcccggaggttcgcagtaacggcagatcaaggatcagacacaggtcagcccgcaacgccccggggttcctgaagatgtacaagaaaatgcaccgcatcaaccgcaaggacctgatgaactccgaggtgatctgctccgtgaagtccaggattctgcagtacgagagcgagcagcagcacaaggacctgctgcgcgcctggagccagtgctccacggaggaggtgccccgggacatggtgcccacacgcatctccgaattcgaaaagctgatccagaagtccaaatccatgccaaatttaggggatgacatgctgtctcccgtaaccctagaaccaccgcaaaatggcctatgtcccaagaggcggttttccattgagtatttgctggaggaagaaaatcaaagcggcccccccgctcggggccggcgaggctgccagtctaacgccctggtgcccattcacattgaagtcaccagcgatgagcagccccgagcacacgtggagttttccgacagcgaccaggacggggttgtgtccgaccacagtgactacattcacctagaggggtcatccttctgcagtgaaagtgactttgatcacttttccttcacatcctccgaaagcttttacggatccagccaccaccaccaccatcaccaccaccaccaccaccgccacctcatcagctcctgcaaaggcaggtgcccggcctcctacactcgatttaccacaatgttaaaacacgaaagagccagacacgaaaacaccgaggagcccagaaggcaagaaatggaccctggcctttctaaacttgcttttctagtcagtcctgtgcctttccggaggaaaaaaaattcggctcctaagaaacagactgaaaaggcaaaatgtaaagcatctgtgtttgaggctctggactctgcccttaaagacatctgtgaccaaattaaagctgaaaagaaaagggggagcttgccggacaacagcatcctgcaccgcctcatcagtgagctgctgccagatgttcccgagaggaactcatccctgagagcgctgaggaggagccccctgcaccagcctctccacccactgcctcccgatggtgctattcattgtccaccctaccagaatgactgcgggagaatgccccgcagtgcctctttccaagacgtggacacagccaacagcagctgccaccaccaagaccgtggcggtgcactccaaggtggatgagcttttctttctttttccttgtggttcagagacccaccctccagctctttcattttccattccaacatctcatcactcccgagctgggagaccatttggcgtcgttatgtgttgtgaagcaaaaacttgttgtgcaaatatgtcttactgaatatttctcatttgcccatgtgatatttggacttgatgtgtggcttaaagtgatcatcaattcacaaaaatttactctttcgaaaacgagagggaaggccattttgtagctcagcattagggttgaaacaaccactactcacattgagacaataaattacgttgtgacatgaatcaaaacctatagttccacaaatagccttttaaaaatgtttatattaacgttaaaactttatattcattcagttaataaataatttgtcacattctatatagaagatactatatcaaaacattcaagaagcaaaactgaaatatgtgattagtaattgatggacacaaagaaattagggtttgtttaatagctttctccatttcaaggacacaatggtgataaaatttttgtgaatgtatctttaagctatatatataaaagtcccatttccaccatttagtgtattcattttctcttttccattacttaattcattcactttctctttctgctaaaacagtcctgtattgaaatttgaattacactattcaggctaacagtgactctaaactctattttcatagataactttgaagtggcaacacaagaataaatagcaattgaaaggcagaggactatttttgagatttatataacttacagcccagggtgttttaatatttgtgaccaattattttcattaattcttacagcacatctgttcactacgtaaattttaagaggctggaatgaacattccgggctgaaagttggtcaacagagaaacttctatgcaccagacactacagagtgctttacatacattatctaataaaactggcataggcctatgaaatgggtgttatttcaaaagccattttcaattttggaagttgggcccagagaggaaaggaaattcgtccaaggtcacacagagagtagataacagaaaagagattcaaacccctaataattcagaatttatagtataaaatataatctcagacaaaaaaaaagacataattcacagttcatactagtgtcaaatatggctcgattgttaattaacttgcacaaatctacttagtctttatgtttgctttcacttttgctacactatacacttacgtttatctttgcctacccttaggctgaagcaacatgcttcaaaataataaattagaatttaaaaaatcaatttctacaattcaaaattttcactaattgaaatgtgtcagaatctcattttttaataaattagctaccttctccaggcttttaatatcctaatataaccatctctcaattttatgtgcagataggagtacatttttgaaacgtaacttggaagggctttgaaatgcatttaaaagtattttgttttttagtaaaatatttactttccaattgtgtttcacccaagtgaaaaatagcttatattccctgggttagaaaaagtaatttaaaatttatgatcattatgaggccctatgatcataaaagtatattaacttagaatttacatcatcaaagtagtcaaaatcctaaaacaatgttttcttattatgaatcagcactttaaattctttcatagatggataaaataaattttatttttaatgcttcttgttagtctggataactagatatatttaagggataaaagaaagaattgacaaatattgacccagttgtactgataaaattctataacatagactactggaatacatttaatgtctagttacatctccatatgtaagtcacgtaagtgcaaaaggtataagatactattaagaactacatgcaatcaaaattttgtaatgtgattatttatgctttgctttaagatgaacaaaaataattcaatatttcataagcaatttggcaactgacatgatgctttctgtttatcccttttttgcttggagtaagaagaaacaatatctctttgtttctttgctttctgataaggtgtttatcatctgggcacaaaggaaggtcgtagataaacagcatggcatcttgagattcaataagtatttaaaaacagaggaagagcgaagaggggagagtaaggcagaaggagaatgttcatcaccaccctcctgtcatcctcatactttctttggttttatctctttctttttcattactacagtcttaaattactccacaaaatgtttctttttctacaaattgttgctattttcaaattctccatcctctgtaaatcttataatagtaattataaataagaagcaaaggcatagaaacagaaagctttggaaaaaatttatatgaaaaatccctctaactataaattgtcttactgggtgtggcaatataattaatcagcaatgtagtaatcatatttatatagacaattataattctgcaacctcagatatttttccttttgaaatgctcttgttttgtgtcttatttcacaactttgtaatgaactatgagttttatgcccatgtgttcgataacggtgtctctccaaatttggggaaaaaagtagtggccaccagggaaaatggcggaacaggttggcttgtaattaagtggatactcaccatgactggccctgttctttccaatagaccgtgagtcccctagaagttactcatccactttgactgacatggggagaagtgcaccaagggaaagaagaggaactccagaaaaagaggtagttaatttaatagcattggagtctttcacagcaacacacttgatacagcacttaccagccaaaaattatcccaaaccagtaacgaactcggacaggaaatgtgaaaatactgagaaactagaaacaattttccttggggcctgagcatagcaactctgaccctagaagcagtccacaccctgaccctagctgtgggtcttccctagtggtggcccagttttggccatgaggcttctccgagtcttgacctgatgcccatgaacttaaccattatgacctaaaagtgtcctgagttagggcacctcgtggaggcaataggtttcctctacaatttcttggcccgctggtccaggagaaagcctgatgtcaactgtgttgtaaatcaatacagagcctacagaaatcatttttgctggcttccttttattggagaggatccctaaaaagagcttttaaccagcccagttctcgggatactgcccctgggaaccacccaccaactgaactctgtccagggccctgagccggggctagagttcttgctcaaactgccttggagccatgacggctggatggaaactaaaagctggacttggactggtagccgctccagaggatcttataggcgtctgatgtagtccagagcctgtgggatccccaaagaagttagaaatggtccaggattcctaaagttcaccagagtcatgggggaaaagaatggagtgaagggattgttggttggtgaggaaggaagagctggcctagctagctatagggtacagggtacctcagggagatctgtggcccccagagtttgaggatgggcacgtgtcacatcacatcacaactaaaagacgagtggctggtggacagagtgttgaaggattcctgagccctctagggaatgcaagatgatcacacctatacttttgcccactaaccagcctcccagtgataattgagctaatattttttgctaatatgttaataagtgtctaatgaagggaatgattacttcttttatgacatctggtccttttattatgattcagagggagctgtgtcaatctccatagaacatagagccattgaccctccacatttatcctaggaagagcctttgtaacagccaaaatgatgcctaggatgcaaacctctgcaggcattttattctctcattataacattaatctaccttagttcctaagattaaatatgatggtgaataagccttctattatattcctattatagcttaaatatctaaatgaagaatgaatggacttatttataaattgcttacaggattaacattacatatgtttgatgattccctgaggtttcctttttctttaaggcacattaaactactttcttgtagaaaattcaaattttaaattagtgctaattgtttatcttccttttcagaaattgcctgcaaaagctgtttatgattttaaggctcagacatctaagtaagtaagataaatactcatcatatgatttaaggtggttttaaatgttagtaatgctttaagagataagcattgcagtaggatctgttacaaatgaggtctaattcccaatgcagcaatctactctaattaaatggttccttcagaattaccttttattttaagtttagttgagaattactgagttttaaattacattaaacatgttaggtagaacacaatgaattctaaaggataggaaaaacaaaaagaatttaggaatatttgtttttagaattttgtgtcaataatgaattaatgaagtattgggggccaggcacagtggctcatgcctgtaatcccagcactttgggaggccaaggcaggcagatggcttgagcccaggagttcaaaaccagcctgggcaacatggcaaaaccatgtctctacaaaaaatacaaaaattagctaggcatgggggcatacacctgtatagtcccagctactcaggaggctgaggcaaaaggatcgcttcaccgggaggtagacgctgccataagctgaggttgcgccactgcactctagcctgggcaacagagcaggaccctgtctcaaaaaaaagaatgaataagtaaataaataaagtattggggagtaattaacactagctgggggaatttgataacatttatttatccaaatattccaagcatagtttgtggggttgatgactagaacttagtacaaagattcctgtattgaagtctccatcctcagcctgcaaagctcagagattctgagcaaagttttctcctttggtcttttggtgtcggtgttttcaccatcctgaattgcaatatttcttttgcctttattctttgctcagcagataggcatgtggttgcggaagcacataagcagacttatatataagagggtgttgcccagattttttgtggcctatgtgcacagacctttaagaaactttgttctccagtagaattcaagacagatattgaattcattgtaaattgtcattaaattattatatgttgtttacactgaatatatatatatataataaccaaaataatttactcataaaaatgcatataatatgagttaatagctctagaaactgtctctggcagaagacatatataaataaatcactcagaatttggtaatgctgctgagataggaaatgaactagataagaaaaatcctgtttagaaattaagatgttgaacatggcttaaatctggcctgaagaaaagcttacatctttttttttcaaattagagaaataagatgctttgtttctactgtactccggtcctaactactgttctgtggatatggtgtgacaatttgtacaatgcatatcagttttataaaataatgttacggagcacacgtttcatttcttctttgtaaaaatcaatccatagctttcttaaatatataaaaacctgaggaatggcaggggatgtgaagtaggaagggtgtccacccaaggctcacgaggtcttctgagaagtcttaattttaaaaagcagctgggcacggtggctcatgcctgtaatcccagcactttgggaggccaaggcagatggatcactcgaggtcagaagttcgagaccagcctggccaacatggtgaaaccccgtctctactgaaaatacaaaaattagccaggggtggtggtgggtgcctgtaatcccagctactcaggaggctgaggtgggagaatcacttgaacctgggaggtgaaggttgcagtgagccaagatcacaccactgcactccagcctgggtgacagagcaagactccatctcaaaaacaaataaaaataaaagtgaggggaaaaaagcaaatgggactttaaaattctaggtctgagatgagagggacacagttttgaaaacttaagagtaagactttcctgtgtcttaaggacttcaaaattttaaatgcaacctatacaaatacaaaagagtctttttcatagctttgaaaaattggttgcctctgattcatatgttcatattatattttaaaaagctagtctcatttccagaaacaaaacatacctagtacaaatgaaactgttgtgttgtgaacattaaatatcttgctttgctttgttttctgttttttacattaggcatttgcacaaaagaaggaagcactgtatttgaatgtaaagctccatgaatcttctttgtttttagggttactgaaaatttaacacattttcaattgtgaagattttagcacttctaaatgtgtgatcattcttttaatataccaccattttttcgattaattcttttaatcaatgagaagtgttctccatcaggtataaatctctctccatcaaacggcctatactaataaatgatccaactgaaaattctgaaccaaaattttttaaaaaaagattaaaaaatgaaaattctgaacaaaacaatgcagaagattccagagtgggagggcagatgtattgcaaaatgaggctcttgggagaagatacaaattaatcgccctccatccaagaataattgcggaggcaaaataatgaaccaacctaatcacctgggtgattaagccaggaaaaattgatgtagtgaaggtgataagtttaggtgtgaattattcaaaatgcataatgtcattataacttaaaattataaatacccaaatcaaatatacctacaattttcttagaaacagccaaaattgaaaaatatagtgtcttaaaaatatttttattttttgtaaataaaagatagaaaggcaagcattggcatatgtctttgcacttaaaacacattcttcttgccccactgaaaattaaaagtgtaagatcttttctgttacacaaaataaattccttatcaagatattctattaaaatacctgtcaaccaacttcaaagatccacaaataaaatttgttctggtgttggcacttctattctgaggctacatgatatttgttttccttcatgtaagcttcagtacatcaaaaggggctggggggctagtaactaactagccaactagcttcaggacaaaaaaaaaaaaaatcagtgcagaactattccatcatttttccaagcttcaaaatgcctcttctctgaactaatggtaaagtagcaagagtctgtcccctcctttaaacttcttattaatctgtctgtgatttatatccaatggaatgtttatacttactctgtttgaaatcatttctaaagttataatgttttaagtgcattctaagaatttgcaaggatcattcttatctaatcggactcaatatcaattggattttttaatattgtaagtatatttgccaaacaaatgcagatctagcgagggtgttgatcttgagaattattgctgtacatcacaaaaagaccatgtcaacgtgtctcttccagggagttgtcatttaagaaaggagatactgtctacatcctcaggaaaattgatcaaaattggtatgagggagaacaccacgggagagtgggcatcttcccgatctcatacgtagaggtaggtcctctccctttctctcttggatggcggtggtttcaaaggtcaccgcagatttgagaataaatgactatttccttcatagaaactcacacctcctgagaaagcacagcctgcaagaccacctccgccagcccagcccggagaaatcggagaagctatagccaaatacaacttcaacgcagacacaaatgtggagctgtcactgagaaaggtagcccagctggttttttgtttgtttgtttttgtttgtttgttcttcagtgggtttgaaaaggctgtatattttcaaaactaaaataggttatctttttctttagacatttttatgtttaccctattttctacaaaggactctttaaggcagcccagagtcacggttccctgctggtccctgtgtccttttagaggagttccccgtgggataccaggcttctccctctgtggcttagtctgggaagccgggcatggggctgaaaatcaaggacttatacattcgggagcacaaaaggaaaaagcagtttgatacacttcaaaatatgttgttttgctgccttatttttcagtcttttaaaaacaagatattccaatccttatcttcctctatcttggaatctaggaatggtcctaggtaaagaagatccttcctcttgggggagccgctttaagagccatctctgcagtgctcttccctggatcatccttctttgggcctcataattgacccaaatttctctagcagcccatccaatcctagtatctcttcttaataatatcaaaagcctcgaggccgggcatggtggctcacgcctgtaatcccagcactttgggaggccaaggcaggtgagcgagattccatctcaaaaaaaaaaaaaaaaaaaaaaacacaaaaaaacaatcaaaaacctcttttaacctgctagtttacataattgagaatgataaatgaattattcttattgctttctaaatatgacatatatttgtttgaggtaactgcctctgcacacaacacaggcgaggtagtaatatttagagtggctctaggacctcccacacctactagtgaaatccttagccaggtgcgatgaagagcaataccacagtcctggtttgttctggtcctggcagaaccttgtctcattctctcccatcagtcttaattctgcatcatcagccgattccttctttcctatcctctgggctgccccacctagcatgagaaccacagagcattacatgaactctgtctcctgttccatgttctacagaaaggcttcaccaatgcctcttacagctcacacaacagcctagcaactacctgttcttggtatactagaaaatcggtgcaattttcagatttggggagactgactttttttttttttttttttttttgagatggagtgtcactctgtcacccaggctggagtgcaatgtgtgctctcagctcactgcaacctctgcctcccaggttcaagcgattctcccacctcagcctcccgattagctgggactacaggtgcccgccaccacacccggctaatttttgtatttttagtagagatggggtttcactatgttggccaggctggtctcgaactcctgacctcatgatccgcccgccttggcctcccaaagtgctgggattacaggcgtgagcgattgcatccagcctgagactgacttttcttgagtatgttctgctcagcggtggtgaagcacacaaaatcaaccatccagcgtttcaacacaaagagaacttccaagtgctactcaaggtcgaagttcttcttgggtagcacctgaagaagggtgccctgttgggctgagattaatgactgtttcagctccatcacaccatcaggtgccgctgcccgagcttctgtatcacctgctgaatgcagctgcagtttttgcccggtagcatcaacttgcctgcctacttctaggctacgtgtagttttgagttaaagtttaaactgagttctgcagcactggctcggtcatggcaggtggaagtgattctagaaagttctatcattgtgaaagccaagggttctattcaaatctttaatgacaagtatggaatggtcaccaactactcagatggatgctgggtttccattgtcagggtgaagaccaggggaatgccagtcttgtcacagctattgatattctagggcgctctctttcccccatccctttagttcactctgtcactacttagcgcatgtagattaaagaagaaaaggggccgggcacagtggctcatgcctgcaatcccagcactttgggaggccgaggcggtcagatcacttgaggtcaggagttggagatcagcctgaccaacatggtgaaacccctatctctgctaaaatacaaaaaattagccgggcctggtggcgggcgcctgtaatcccagctacttggtaggctgaggcaagagaattcttaaacccaggaggtgcgggttgcagtgagccatgatcacaccactgcactccagcccgggtgacagagtgagattccctctcaaaaaaaaaaaaaaaatagaaataaaaaaagaaaacggtgtaccattcgatgttctcccttctagaggtgttttctgtaacccatttcagacagaccctcacagcaagctatggtgcactttctgaagctcttcctacagaaggccaatgcactgaacctgccagagataaaataatcctattgtcattgagacattaccttttacactattctgctttttgaaataacttagacaaataatttcacacaataccagcataaacaagtataaacccgttcacattaatcaggcatccttagggaagattctgatggcctgaatggacatttcaattacatatatgttgatcatgtgtatttttctagtaagcactagtaccttacttgccctcccctgattaaacaaaaactgaaggtataaaacctgcccaaatggaaacctattttttcatagaaaacattgacaattatattttcatgttattctatctctgtttctaatgcatttttctcatattcataacagggagatagagttattcttcttaaaagagttgatcaaaactggtatgaaggtaaaatcccaggaaccaacagacaaggcatcttccctgtttcctatgtggaggtcgtcaagaagaacacaaaaggtgctgaggactaccctgaccctccaataccccacagctattctagtgataggattcacagcttgagctcaaataaggtaagaacatactctatcatgttaatgtaatattggaagctccaagtaagataatcggtgtgtgactttaggatattagattagaatatcatatctattgcagagaaagagatttacatattatgtttctacatgtgtgagtgccacatcagtaaatataagtcagtgtttctcaaataggtgctggcataaagatttaatgattaattttgctcatttcattttcaagttaaaatatcgaaagagaaagagaaaacgagagtatcatgaagtctcgtatgatatatatctgtactcctgtgtacataaatgttttctgaaataattttttcctaaagcttcatttttatatatgtaaattttatgtatataatataatctttacatataaataaatataatcatatattcatacatgtatatacaattgtgatttataatttgaaatataaatatacacaacacaaaatactatgtatatctcaaaatagtatatcacaagaacaccgggttattaggttgacaaatctatacaagttttttatatggaaaatgagctagagcaaaaatttttaattagagtctataagtcaagatgtttattagtttaaatgaaaatgttgtcggttattataagtcctcaagtttgttttatcagttttaggacagttatatgccagttctactgtttcacttgagcgggctaaagatgattatctttctcaatacgtaatttaaaagaggctttgcttctttaattggtgaatgtaaaaaggctatttgtctgtactcacaatgtgaaattttttcttatttttctgatgaattatattctttttatgaaaggcatgtaagggtcttttttctcattaacttctaggaataaaactttaaattgccaatgacttccaaaatgttttaagtacttctcaacattcaaaaaatgtattaagttgcctaatttattaattattttaattgagatcaaggctaggacatgaaaagctaaaccatcgagagctggtaaaataaaatcaacatatcagatgttactaaagtgtgaagtcacttcatgttccgatgaaaaaactgtttcaagatagcatcccagtgacctaaactacttcttgaaaatgagcctgagaaggattttatatgaggaaatgatctaagaatctgccatcttaagagaggcatttttttttagaaggctgaagtcttggcattttatttattgtgatcctctttgaagactgagtttcagttgcaaataattaccctcaaccctgtattcatggataatatatggaagagtttggtactatccaattttgtttgcttgattggttatagttttccagaatcttcttaagtatatttacttcattaccagaccttagcatttacagatcagcatccttccttcagtattttctattgataaagagaaaagataagaatcttcatgcatatatttgtcttatccaccattcagtcatctttaaataactatcacagaaatttcaaagcaactgtaccttcaaataaaatgttgtaaggaagaaaagcatgtatgtacaaaagctcattaaacatctaacaaattcttccatatgtcctaatataatatttaatggcaatataatatttttgatcccaatgttttcatctttgatgtgaatacaatttaactgtaattgaatatattttcaagtttttaaagtaataccagattttaaacagaggcatgtacaaatttcactaataaccagttttttattgctcactgctggggaaaaaatatgttgagaagcttatgtccataattaggaagaaatacttaatggttttatcccaactggtaatccatgctgtgatgtcacaggcttaatgaagaaaacttcccggaagtgacaaccatttttagaaagataaatataatgtatttctaaatgataacatccaaaatatactaaacgctacagaacctattttctaactgatatttacaaacagagaactcattaataatttataaatcactctggtgacacatttaaatcacatttcttgacatactgtctttgtcttaggggagactaaaatgtatgttgattttatttctgatatttctgcttttagtgcattagaatccaattctgatgcttttggaaaacaaaataattgtatgggttttgtattataggtataggtttgtgatctagttataccaggatgcttcatttggctttcggtataagcaagtccatcataaagctaagcagtttaacctgctgacatgtatttcggtgactgtggtggtgacggcacagcgtagtcgcagcatcagatagcaatggtgatggtggcagtaatgacaagggaattcaagatctttctttctcatctacataatattcctggcataacagaaagtgaaagtggaaacctgatggtctgaaattattatatatttcacagactttccaaatctaactatgaaaacttctgtgttatgtaacaaggggtataaactagaactctagctagtaagggaacttctgtagactgctgaatgagacttgagtggtttatatcattgaaaactcagcatctacaggacttaacaggagtggctgtctacctaggcgcaaaccacacgtgcagtctcactgtgtgtcagcagctaagcagcccaggtcctgaatcctgtattaagatgctcacatgagttttgtgatatttatgtcatcccacgataagatgacttaaaaaaaaaaagctaaataaatctaattaataccccactcctactataggacacaggagtcaaaagttaagtaggaaatgcatcacccactcacacacactaagtccccaggagcaagagggctgcttccctgtgtaaagtgttatcctaaacaatcagctggaaagtgtatctccagaatctttttggagatgtttttctttccaaatcaaagacatctacctggagagacctaaagtgaaaggtcccttctcaaggcttttaggcacatagcaggtagcattttctctagtccggtaagggtagataaacgtattccaatgttagtaagtggcacttctggaactacattttttaatttctaatttttatgggtacatatggggtgtatatatttatcagaactacttttaatacctttgcataaaatttcaaatgtattgtttcatttactatatccaaaatacatcagtaatactacgtatgtagaagtaagtatattttacttcagaagattaagcttcataactcatacctcctctgatttacataaatgtcaagctttgaaagagaacgggagctgaagcagaagtcctccctcccgttagcatcaaatgagctttctatgtaaatatttactttggattttttaaaactttgaagccgtagttatgtaagctcagcttcattctgatcatgggttcctgtctttgagacatagttttcagaacttattcacttagaaatttgttaacatataatgatctaaaatactttattcatatgttgtaatcaccttgcaaacataagtgagaaaattgtcagcgtttaaaagattgggctatcctgcaggacaagagaacactacacacattcaggaaataaaatgacttcactattagttttcattctacattaacatttctctggagtcatttatactctactaagtcagtatctggaaacctgtaatatcttttcaacatagtttaaagtaagtaagcattaaatctcttaagggccaggcgcggtggctcacacctgtaaccccagcactttgggaggctgaggtgggtgggtcacgaggtcaggagttcaagaccagcctggccaacatggtgaaacccgtctctactaaaaatataaaaattagctgtactggtgacatgcgcctgtagtcccagctactcgggaggatgaagcaggaaaatcgtttgaacctgggaggcagaggttgcagtgagccgagatcacaccactgcactccagcctgggtgccacagcgagactccatctctaaaaaattttttaaaaaattaaaaataaataaaaataaatctctcaaggttttactgtcctggtaatctctatatcatctttatcttgtttgacatttaagaccccttccaaaactagtagagtttcatttgtgaagtaacttttctaattaacataaatgattttatgtatttaaatttcagcaaaataccttcaaatctagatatcttctaaatgtcttcaaatctatgttaaacataaaattattttcatattcaccaccgcatcttttctgcatttctccatcgctatgttttgatgcattattattattttcttagtttattttttcttaacttcataatccgtgctcatttccaagttggcttccagtgaaccagcccctcctcccacccacaaagtctcacctggctcagataaaggagctctccagggaactggccagggctggttgtccctgacagcctcatgtctaccagcaaaccctttggccccaacaccacctcgtttcctggacaacttcttgggtgaattggagaagcttggtgctttaaccttgtcagctgaccaagccaaaccaaccatcctagaggacgccatcctggaaattaaggaggaacctgctgtcctcctcccattgtccccagcgactgcacctgccgaatcaccttccactcacgcgggtgtggcctcggctgcagcccagccttaccatgcagagcctcttcaggatcccagaacgacaactcaaagcaactttgcagagttgagaaaaatgagaaggggcttctcagaccctaaaaaggcaccagaagtcctaggggataattttgtggcctctgcgtgcaccagcgtgggttccttgcctgtaccccttccggtcattggagaggaagatgagggcatctatgaggggattgtgtcaggcatccagagagggccgccagaacctcaggaaggagacgcctggtggtgtggccacgatgggtcagagggcaccccacacctgcacattgaagaggaggaggaggaggagaaacccaactgcctaaaacaccccatagccacccccacagatcctaggacccccaaggaggacagcaatgcagcaaaacccagtaatgaggtattttaattttgtctgattatggaagaactaaccggccttaccatgattagctattagagttaatcatattaataaatacctattttgactaacagatttttttaaacaaaaaacacaaatactatataagatgggggtggagtgggtatatgaaaacacaccatatttaattaaatgatgtaaatatgtgatataattccattatcccatttttcttcaggaccataaacttatattgtaaaagtctttgtaattgatatagtctttgtaatcttccaatattaacaatgatagctaatagtggagctcttactgagtatcagacactattctaaaaactccacatctttaatcgtcaaaacccagtgaggtgtgtgacattatcatccccactttagagaagaggaagttgatgcccagaaatttgtcctattccaggatgagaaactgtacaccatacctttgacataacggcactttgcaaaaataataatgctaataataaacaaagacaacagaaaagaaaaacagcacttctgtcccctttcgattttctaaagaggtcgttctctttgtgttgacttcacattgactacttaagaactgggtactgtatcttcatgttatgaagaatcttgaacagtggttttaatcaacaaaggcagaaaatatccagaaactttagcttgcaaacctctctcttaaaacaaaaaacgagcctgcaacgccagcacttccagaggccgaggcaggcagatcacctgaggtcaggaatttgagatcagcctggccaacatggtgaaaccccgtcactaccaaaaatacaaaaactagccaggcgtggtggtgggtgcctacaatcccagctactcgggaggctgaggcaggagaatcacttgaacccgggaggaggaggttgtaatgagctgagatcgtgccagtgcactccagcctgggtgacagagcgagactccatctcaaaaaaaaagagaaacttaaggccagctgcggtggcttacgcctgtaatccagcactttgggagcccaaggctggtggatcatctgaggtcaggagttcgaaaccaacctgtccaacatggtaaaacccccatctccactaaaaatacaaaaattagtcagacatggtgttgggtgcctgtaatcccagctactcgggaggctgaggcaggagaactgcttcaaaccgggaggcggaggttgcagtgaactgaagttgtgccactgcactccgttctgggcaaaaagagcaaaactccatttcaaaaataaaaagaaacttgatcccacaaatgtaccctgtgaattaagaagcaagtataattactggcaattatagaaattatgaaataacagaaaggatggttcctattacgctactatccaagtcaaattctttcatagttcctgtatttcaaaataacccggccaggcctgcatttgtgtaaaacaaacaccttatttaataacagatagataattcattgcaaggagccaaacgtgtctctacatcaattatttcagtaactaatattcctttcaattcaatcaatctgaaggtgtgattagatgtgtggctttgctgacacagacagtaccctaggccggctcatcccagcaccagctcacaccctgcacgcggggccacggcttccccagctttgtgacacgctgactatagttggcaacctactttacacgcaagttacagtcattgcagggttttaaatacttttttccttcacttttagaaggagccatcatataaatatatgagaaaatgatagaatataggtgttcctatctccagccacccccatgcgaaaaattaaactgatcataccattggggattttgaatcaaattcaaaagaggaagttagtggtttcaaagcaaaaaatttgtcataaatataacttcccaaggttattagtaactttaaaatgttggaagttgagaggaaattccgtaaagagcatgtaacctcattctgagacaagcataatcacctctcgtctttcctcgatatttaagcctccgtcattttcttcgggagagcaagcacccacaccctttcccagccacctgctttcctcccctccatttcattctctcttcgcctctgtttctgacctggactctacactttctcagccctgctcacctcctctcctccctaaatattcttatcaacaggagatcaatccaccaaaattaaaggtaactgcatcttgagtgtggtttattgcatgtcttcaatgagcttaattagtaagatgtatgcattcagatttgcgccctctcacaagacctacgaagttacataaatactgattgctaacttttaacatcatgggcgtggcctctatccaaacatttaaaagacatatttgcatagcagctatacccagattgaggagaaaaacaaattaaaatgtatatcataataagaagtaatgatgagattgttttcagttggccgtcagcatgagaagcatcacatttaaggtatcttagctcagtgcctgccattctccatcacctctcagtggactcattgtctcccgtcatttcccaccgatcggcaggttcagcagagcctggagacaggatgatctttggcattgactgtcttgagccttgttcttccacaaaagtgacgtaaattcatgaggatgtgggaaggatcatccttttgtagcacttcacaaagcatccatctctgagacttgcaggctgacagttccgctggtatttaacctaaagatactatttttaaaaaattattttaacaaaattaatgactggccttggaaagagatttaatgacaaccacagcatgaaattagtccatcactgaaatgttttccttctatgttcagaatgatcctaaaacattttcctttggaaaaaaggtgacagacttcaaacaatagctcaccctcacattcagtcttttgaatgtgaaatgagagcctctgcacataagtaaaaatttagggctctaatacagctaaggttctgtattaggaagtgccatttatacaatctcaaaaccactaccaccaaacccattcgctgacatagtctatctatgtgctcctgttaggcgtgaaaggaactttgtaaaaaatgaaacactttaattgcttttgctctttgaggttttttttcttagctggcagaaaataattaggaaatgttttaaataatgccactttatatgatgcctaaggctaagaatttctctttttttctcttctgtctgtggttttatttttaaggccaaggtatttatttcttgtctttttttttaacttgttcttcggtttttaagcttagtcaataagagggaaagtagccttagaatctgagttctctaatttggaaagacggaggacgcaccatcgtagcatcaggacaaagccaggatttaaaaaggtttactcttctgcaagaacaaaattcttctcgtatattctttaagtttccgttgtttgcagaatgacatgagagaatggaggtattcacaataactatgttttaaaagaatattttaatgaccacatgagatacttctgactaactccagcaaatcaaagtgattttctctgttttatctcctatttaggaggaaatctcaatttttgaatctcccactgagtttttttaaaccttataaatctattttgtagtcattgaaagaatatattcactgaagttatttgtgcttgtaaatttaagtacaaattgaatcaactcgtaattttaggccattatagtttaattctgcatctgacccagttacaaactctgccaatctgagtccgaagcctttttatttcttccatttcaagaatgctgatgctcattgtaaagaaaagaaataacccagcactgaaagcaaagagaaaataaactcttagtaatgttttaatgacatagtatagcacgcatgaaatcattgtaataacatttttatcaaccccatcaaccattgtttagttaactcatgttaagtcagtgcaatttcattctttaaagtgttttctaagacaatgacaatctccataaaagtaaatgcaatccagaatcttccataaacgtaaaagttcctaccactttatagattacagatgactgaaagatacataaattatgtttaatgtataaatctgaatccaatatttcccccagtcttctgagcatctgcttttaaaataatgattttttcataacaaaaaatagtataaattggctgggcacggtggctcatgcctgtaatcccagcactttgagaggccaaggtgggtggatcacaaggtcaggagttcaagaccagcctggccaagatggtgaaaccccgtctctaccaaaaatacaaaaattagccggacgtggtgacaggtgcctgtaatcccagctactcggaagggtgaggcagagaattgcttgaacccgggaggcagaggttgcagtgagccgagaccgtgccactgcactccagcctggcaacagagcgagactccatctcaaaaaaaatagtataaatctcagctcctctataagctgagcctccatttccatccgagagactattttgcaagagacttgccgcatgtggtctcaagttgcagcggaagctctgtgaggagagtgagaggctcttttttaggtttcttccaagtaactcagtggttgtggtcccaccaggaagtctcgtcaccctaaagcagtcccatcagaaggggatccccggcgcacggttttcaacatgaaatcaggccctgatttttcctaatatgttcacgtgctctttccagctgttatgatccacatcattctaaaagctaaatggggttattttttttctctaagagctctgatatgcattgaacccctgtattagtcaagactgggataagcacagtcccagaaaactcaaaataattatagcttaaacaacgtagaaatatattgctcttacacataaatgaagggtgtccgggactggtatggtggccccgcagtcatcagagaacccaggagtttccatctgatgtgggctcatcgccatcctcagagagaagcttccgctatgggtcccaggtggcagctcgagtagttcccttctcacacgaaccagcaggaaggagaaaagatgggagattacaccttctcccttgaaggccaagtcccagaattgcatatatcccctcggtctcagcttatgacatgagtacatccagctacaagtcaggaaatgtggtctttatccagaatggccatgtgcctacccaacagcctggccccattactgaggaccaagaagagaatggatgtggagagcatcaagcatcgtctgccacgacacttaagcaacggtgccaaacacatttcatcccgagaggctggggatttgaggtcaatcattactgagaattaggaaaacttttctaaatgagagttgagaaaaccacatgcttttatttaagcgtgttttattcctccggaagttctcttaagccagatcaaataccaggcagtacactgccagatcctgtccgctattggaaggaaaataaaacctacacaaaagaaggtcagcttactcactgtcatatgaaagatcttactctgaaaataaaaaaaaaacaccaaaacagtccagcccacaggttggcacttcagtagttcatcaaatttcaccatgtttccccccaaaaaggccttattttcttcttatgtgttagaaaattttgcctccaacaaatgtctgatacagtccatgaaatttgacaggcattaagccaaattctcctctatctcaccttgcatcccttcaataagatgaaaaagcagggcaggtttgagagcatcttgaacccaattgctaagcattctatgaaagacataacatttcttggccgggcgcagtggctgacacctgtaatcccagcactttgggagcccgaggcaggcagatcacttgaggtcaggagttcaagaccagcctgaccaacatggtgaaatcctgtctctactaaaaatacaaaaattagctgggcctggtggcgggtgcctgtgatcccagctactcgggaggctgagacaagagaatcgctcgaacccgggagatggaggttgcagtgagccgagactgtgccattgcactccagcctgggcgacagagccagactccgtctcaaaaaaataaaagacaaaaaaagatataacatttcttatatgttcttggcctcttccctatgccagctttcctctgtgaacctttttctgctgtgcctgtgggtgccatgttaagatggcagctggtgcctgtggtgtggaaactgtataagcagctggagaagctgtggaccctccctgccctgctgttgtgcaggagtttggcatgctgtgtgtgcatggaaaaagccagccaggaaagctcctcctgaagtctgtgtgacgaagatgagagctaactaacttcttgtacattttccaggctgacgtaaaaagcgagatatgtgtcctgggtaagcctcctcgtagcccagtgatgtctaggagattctgcggctcacctgtcagagggctcagcggttcccacagggtagggtcagcatgcccccactttgtggcaggcatcctggccacctcccccgcccccagggctggctcttccttagttgtctttgctgtgaactggccttaaagtgaggctggagacaccctgaagatgaagcgaccacctggtgatgtgcttcccttttaggtgtgtgtgaggtttccaaactccacaaagacatggtcagattctctactctacaaataagagtgtcgtgtgttttgtggtctacatctgtctcatggttctacactaaatcactgctttctagtcaccgtttctcctgcaaagaaaaaactgttgccaagcatctacagtgccgaactcacacacttccggtcatgtttgcttctgtgtcattcaatttggattttttttaaatccatgattcttgtctaacatcttctgtttctctggtgatgtgcactacatcctctcagtctgccttttgtccccatactgctgtctggattctatccacttcctatttcttgccagctctgattgaacttaaaggtcaaattactttcccttagctacttcgttccatagtatctacagtactttaaaatacatggactctaaatggtacttactatcaattctaaggaatgcagccaaggagtttggaaattttcatctggacataagtcaggattcctttcctcatttctgttttaatggacccggattcaaccttgactggcctatcgcatggccgtgcttctgcatttcaagaagttctcaagggcttgatttcacagaagtcttcattttttatttctaaagaaaagtcgatattattctgcattcatgccactttgtgctttttgcattgcataggaagacctcattttgttgctgaggcagagctttgtgttgccatagagacagaaatgccaatttgtagagactcttagactcccccgaatggccttccagagccaaagcaaaacataagcttcttttgcagtgaaaaggacccatctataaccctcctgtgggtccacgagatggtatgcttgtgttccccttaaggttttttttttattttttgcctgatttttacattatgtatttgtatgtcagattacacgtgtgtttgtgtgaaccataaatattctatttttttagatttatgcaaagttgtgttttaccttcataatttaagaaggaaaaataagcctctagaaacataaacgtggtattattaggagaatttcatcgaattctggtgggcaaatatgacaactaatattttataaaaaaagataaaaacactttagcactgcttatattgctttcagagatttttttgcattagtgtttaaagtaacagtcaatccttctttaagaattatttgatactaaatatagctaatcctccagagataactgcagaagctttgataaattagacggcttttcaacagactgtagctcactaagatcggaaagtatatattttactgatgttacagactccatgatgtttcaaaccagcttccttatgaacagcaacttgtgattggttctggctttggaaattagcatgtgtttaaaacttgtctcttttgtatccgtttttgacaacattaaaaaatagctacagaaaaatacttacatagtcagggctacagaaaaaaatacatatttaggatacgatgaaaaccgcagcatgcttcactggatttttctcttgttctactcttaagattcatcaaggaaatataagcataatataattcttgttcaaaatgcccagcacagtgattgtaatgtgtcagttgaaagccatctttctaggttcagctcatgtaagcctctctgaatgtcacaagtgtatattgttctatatttatcttaaaactgctaagaagttaggggaaatggaaatgcctgcacagatagtcaaaatagaaatggacacggaccaaaaatgctggtggctttacaagggatgctttctcaaaaatttaaaacgtggggagggaagaacatggttaggaaaacagatgactgtctattccacatcactctgcggcctttaaaataggcttttaaaatttttccagccttgggaacttggataaaaaggggcagataaagcagaaacaactctcagcttgttgctgccattgctcaccactaggtggcgacagagtgcagctgcattacaaatctctgcttaagcgacttgccatttgagttacatcaccaaggggaaagggcgaaagacagtctccccagataatctatttacatcaccttataggacatttgcacctacctcagcgtcaaaattaagatgctgattttagccaaggtaggccaagtagtccatcatagtaatctttcatgcaatagcgtgcacatcgaaattaccattttgtttctttttctgtttgttttttacctatttgtcgtattaagaaattatccagtatctttgggttttggtttaccattctgcaaaatggagttgaattgtaaccattatttttttttacgtgaccgagacacatgagaattaaccaatcaatgtcagtgtcccagctctctgtgtaaaactgatgacggacacctttacacagcagaggaaatacatctgtggaaatgtgtatccttcatggaatccctgaggggacccgattaaccctcatcttgtccaactcattgatttcagagatagggaagctgaggcatccccaaggttatatggtgcttaacgcccaaaacagaaagacgcagatgagccgtcttagataactgttcttgctactcattccctactagtcaaatgcctttaaaataaactatttcaagtactgtaattagtcagctttcctcaaaactgtctcctagttatccacattaacatggaggtgattcttgttaaaggtaagctttgaaaagttctaaaactcgccattataagacacacacaacttctctgctacgaaaagtcttgattgattctggcctcaggatgtgaacagtatagaaaactgatgatttgtgtgtaaaaagaggggcagggtttgaaagatatgaaggaagggaaaagagaaattgggaaacaggtaaaagcaaggacgggggccgggcgcagtgactcacgcctgtaatcccagcactttaggaggccaaggcgggaagatcacaaggtcaggagatcgagaccatcctggctaacatggtgaaaccctgtctctactaaaaatacaaaaattagctgggcacggtggtgcgtgcctgtagtcccagctactcgggaggctgaggcaggagaatcgcttgaacccgggaggcagaggttgcagtgagccaagatcacaccactgacctctagcctggtggcagagtgagactccatctcaaaaaaaaaaaaaaaaaaaaaaagcaaggacggtgctggctgccccacacaggaacatacgttctccagccatggacgtgggatccaggaagctgcaggtttgcagcaatcaccaaattttcataatggtcaatgggacagttcagttaaatgattgatgaggtgggttgagttaaaggaattaaactagtagaattataatgatgataactaaaaagggatatacggactttaaaagttgattgttttacattaatgaacaatttgatttttaaagtggtattcacattttaacaaaagagcaatgaaatgaaactaaccagttttacaaagcattggatgccatgatgtagaagttgaaacttttactcaattttaaaatattaaaatggtttaaatgtgtgaaaacagggatgccaattttagagcataatgaaatatattttacacaacattttctcttaagacaagaataaataatattttcttattcataactttattatgcactgcaaatggtgctatgattgttttggggaaagagtagtagctatcttggtatatgatatgcagtctggcatattagacattttcaagttacttttgagtacagtatttttcagtgactaacatgtacattctcaaaatcatatggctttaatgcatactctttggccagaagttttactcctgggaatatattctaaagaatagttcaaaagaagaaaatagctctttgcataaaaaatgtgtatagcattgctgtttatgatagcaaaaaaaaaaagactagaccaattctaacttcaaaactaaaaaaaaaagagaggaatggttaagaaaactatgatatgtagacacacgtgggagaacattattctgcagacatttgaaataagaaagaagactgagaaaaaaagactggaaagttattacaaaataatattaatggcaattgatgtatacaaatcttacttctgcatgaaagttttatacatatataaagttttattggactggaagagaacttgaaataggtaatatgatacaggcttatcaatgacttacaattaccatcttatatatttaaattgatttaataatatcttgaattaaatgacctttaagatggttggaaaactggttagtcataatttttcttaaaatatgaatatcttccaattttaataatagatacatcattagtagtcatattgatttacaggagtaaactatttcactcttaagtcataattgtgtgcagtaattcttacgcactctagttttaaatattctatccacagactgttgagtgaaatttctaagaacactgttaataaaggtttccagttaaccgagtcagagcttacagttttagtactgtgagtacctagtcttatgctagatagacaagtaggatagaaagggggtggataaagaatttaggaagtgggtgaatcattgactcgtagactgaaaggaacctcagaattatccatccaagcttggatcagtggggtttctatggacaattggcagcaagagatttcagcctatcagtaatccactcataactatggaaatctaagaactggtcccaaagtctaaggacatggatctaatagctatttcagtagtcatcaaacagtcacttatataattgccatgcaaattctgattttaccctgtagctatcatttagaagcaaatgcttttgaaatggattatgaatgatttgtttgcatttctcccctaaaaggtaaagtttaggtagtcaatataaattacactgagtttatatattcaacaaacatgttaactttcattcactgaaaatattaatgtgggtatatgggatgctaaggcttgtcatttccaatattataagtatctattacagatactggtcttgatgcttagtttaaaaagaaaagaaactcttttgagagttcagtgcactggaaatttctaccaatgtttctcttctaaggtaaaatgttacatgttacccggatattgttcgttgcattccaaagttctgttttctctttttaaaaatgcatgttttctctccacattgagaacagaaaatgttaattcaaatgtagcatgggatgtctgcctattgatattttcctctgtgctgtatgtgaaaatgttgtctgtgaaggaaagattgaaagaatgagtgtggatactttgctgttaaactaaatgtggtttattttctgcttgtttgagaaaacgctggagaataaggttgtatgaaggtgtctatatttcctattctagtggtttgccgtctatgttcttgccttattcctggcctttgaaaaatcaatgggaccaaaccctgacttttccttaaagcttgagcagactagattgtagacatgttcaaaacatttgaccttgcttattttgctttaatttaaagctccctttaaatattttaattattaatcctgcagaaagcttttatttggtttttttcttcctcttggttttttacaacaggaaatattaaatgtcaagaaaagtaccatgccattatccaaattatcttttaattagtaccagtttaaacattgattacattgaaaatcatttcatttcagccacagcgtcctgtgtttactcatgaaaatattcaaggtgggggggaaccgtaagtattcttcttatcttctaaatttgagactaaccttgacccacaaaatggacaactgtaccaaaatgtaagatgtatggctttgcacgtgaaagatcaaactaacatgaggcctcttaaattacgagaaattgtaatagtctctccatcttttatgacagtgaccagaaactaatttttaaaagaacccatagttctctgagaagattttaattgacacactaggaaaacttcccaatgcttcagtgattcctaagatggataactctgtctccctctctgctctgctggctgtgtaacgagtaactgcgagcttcaaagacatacagaacatgttctaaccttacttttacacccactgggagacggtaaaagtggacctcagtgtaaaaaagacctaaagcgatcattccatcattccaaagttacatgcttagaagggtcatttgaaaagggcagtattaaaacactcactgttattcagttacatgcgattacttccacagcaccaggaaaatgccttttcaaactttcctttcaaattccttctcctttctgatacatgagttaaatcagcctgaaggtgtcacacgttgtcttgaagattctctctgtgtgtttctttttcgggcccattttgtccctgagagacgttcaggagttatcagcttcctgttggcctctgcccacactgtgagtcgagagtgagacccctgggaaggcttattcatggacctaaccccttgtcccccatatctgagcacacactggggatcctgacccactgcccacactctgctcacctggagcagaacaggctaacaatagcctcctccttgcggcaggtcctggcatatgacctggtgcctttatcaccatcaagtccttccttgctcctcacagacctgaaacttagcaaaaagcagctccggatgagactggctctcacagagcacaggcagaaaagtgttcttgttgcgggaaagtctgtattttggaaagaacaggttagcagtgataatcatttgaaatctcactgaaggttaggtgcagtcactatgcctgaaatcccagcactttggaaggccaaaacccaggagttcaagaccagcctggacaacatagcaaaacaccatctctacaaaaataaaaataaaaaattagtcaggtgtgatggcatgcgcctgtagtcccagctgcttagtaggctgaggtgggaagatcacttgggccagggagatcaaggctacaataagccatgatgatggccctgcactccagcctgggcaacagagcaagaccctgtctcaaacaaacaaacaaacaaaaagatcgcttaactggaaaacactaaatacgacttgtcattctaaagcttttgtttgttctcttatttacccaaacgatgataagatcacatgataaaaaataaattccagggctgtttaggtttattgcattaccaacatgttatattaaacagctttcaaagtgtttatgaatgaaagatatgttacattttcaaagtcctgatttgtatattagaaaacattgtttattaaatttatatttgattatagcctgaattagtgggattttagggtgttgcttagttgctttcatttaaaaataagttttgagccaaagtaggaacataatgttatgtcactacaattcagagttttagtgaaatatgttctagaaaaagttgcaagttatcgagagggcttccagtctggctcagcatttcctgtttaaaagacacctttctttttgaggcatccttaccccaccaccatcactcacctcaccaacacatctttcacaacagcattttttaacattggatttgtcttcatttcccattgtgcaacactggctttgaaagccaggagaggcaggaggatttcctgaaggtgtgtttacgtttccataaaactccgtgggttttcttttgttttgtttttgtttctgtggtctaattaaaccagaatggtaaataaatttggacaaacatgctggctttcatcagacaaaaatgaagcaggagtctgtgccaattttgttgcgttagctctgagaccttgagattctttccagcagctgaggtttgcagccttaggtaaccggtctccatgagtgggtggagatgagcctgggcagggttcaagcctgagaagctcaataaaagaatcagttttcccaaagtgagaaatgccgtgtgtatccatcaaaacagcagcccaggaaccaccatctctctcaaatgtgaaactggaaaagggaccgtgaactttccccacagatacacaaaagataccaccccttcacctgagcagcctccaaatcaaattctttacacaagcaacaaaataaatggactacccctagcaaagctggccacatgcaaacatccaaatcaggtgacgtttctgtattccacacctgcctgtctttttggccactactctgggatgctagctgcctttctctgcccttccccataatcacaaacccctctctcaagaaaaggcctcagaagcccatgctcaaaaggatataagtggctgtaaggtctactggaaggatgaagttttaacaggagaagaagcctctaatgttgaaatttcaggctttggtgccaggccagggaaaacaatattttctaggggatgttgttaggcattctctgaagccaactctatccagctcccccagtccaaatgctggatgaacggggggaagccagtaggtcactgttgcttattaatgacataagatttgagtttaaatgatagaatagttttgttctaccaaaatattattttctgactcataaagtaattaaaaataaatcattcttgttccggagcggtagtcaagattatcaacttttttaagttggcatgaaaaaatctaaaataccctagaaagtggtaattattttctcacattagcagaatgacatgactgttacagaaagcagcagaaacaaattcccaatttttaaaaaccccctcacagtactggtaatattttagtactattatgaagaagttttcatgttaactgcctatcaaattcttcttgaccttctcagctacagtaatttcgccttcattttccaaaaacaccagcccatgttactatttattataatgtatggtgttttcttaccacaaattcagtgtctgaattcattattgatcaatttccaccacagtatatgctgtcaaagaattcaggccgggaaaggaaagtgatagcattctatcaataattcttttttatataaaattatttcaagagagagttttaaaatcaaatacaatttttctgggactcattttaaaaagagacttatgtccatagtctgcttgaaatggaatcagtaataactgcacatagaatacatctactcaacttcataggctaattacatcaaatcttccaattctacatcctcagaaaacactgatccaaaccataacattaaactgatctaaagaattcctcttagtaaaaaaaataattttcctttgtatagtaattcacacagagtgattaaaaagacatgtctgacacattttgtctatctccatttagaacctttgaaaattcaattctcaagcccccattatttgcttctgattatggctagctaaaattgtgattccttcttgtttttaaacagttaaataatacaaatatcacttattttatattttgtactattatttaatgtctaaatgatagacgttagatggctggacaactgaaatgcgggtctgacttatacatgttgacatattttaatccaatttatgaatgttacaattttcatggatattcctcgtgagtttcaaaatgttgttagagtgttctaatgcctgtgaagatctacatattgctatgtacctgcttaccaggcttgtaccatccaatagaatgctatttacatgcttaccaggcttgtaccacccaacagaatgttgttaagaataggaatgttaaaggaagaatgaatattgttctatcttctatatttcatgaaggtgtcaagatgtttttaaacacattcccttgtcctgtttaaggtttcaggctctgtataactatactcccaggaatgaagatgagctggagctcagagaaagtgatgtcattgatgtcatggaaaagtgtgatgacggctggtttgtgggtatgtgcgcttcttcctcaggcaccttcggctattttgtaatttgcttgagtttgctcactcccgtggtttgctgtgatggccgagcttcctttgaattcgtaatgcctttgatctttcagacattcatatgcacaatgtaatcccaaggctattgcatttttaatatagtttagtattcactgcttcagctatgtgtgattttctgcgagctttatttccaactcaactgagagaagacaatttctttaaatagcaaaaaccaggaaagattgagatctaagaacaacaacaacaaatggtccccagaagagaaatatcaacgctctgtgctgtggaaaatgttagttgtccacagtgagaatctaatttcagagggagtgagattaagtgaacagctctcccgtttcctaggtctgacgtagatgcccgaacattcagtgactcaccttaactttagtttgtggtggaagcagagagacgttccattcttcccacttaaaaggcaacttcatctttaccatcctaaaaaaaaagacgagaggtcttctgggaaaacatttgtagacaaaagtattttacactgggccacagaaagaggtgaaaaggaaacacaggctgcagggcagagaatggaagagaggaaaggtgagaggagaggagggctcactctagacatccatcggtggcaaaatcatgaaagaattgaggccctggtgcggccacaagcctctgattttatttccattaaaagaagaaaaaaaggccgggtgcggtggctcatgcctgtaattctagcactttgggaggccgaggcgggtggattacctgaggccaggagttcgaggccagcctggtcaacatggtgaaaccccgtatctaccaaaagtacaataatcagctgggcttggtggcaggtgcctgtaatcccagccactcaggaggctaaggcaggagaattgcttgaacccaagaggcagaggttgcagtgagccgagatcatgccactgcactccagcctgggcgacaagagcgaaactccatctcaaaaacaaggaggaggaggaggagggaggaggaggagggaggagaaacgtaaaatggcttgcctagccaaggaaaaagaaaaacagccatcaaaccaaggcagtaagtgccaggatataggagacagatgaagcttgagagacccttatccggtccatctgcgctgcctaaagaagaatttagcaatttagtgcaccaacttttacaagaagtgtccaaggaattacattatttgaaaccagaggcgaacataattatgatagccatttgtgcgtgtggttaaacacacaccatgttaaaaatcatgccactgatagaactcccacacacaaatagtgcttaatcctttttttcattaatgatttgtaaattgttgaaaaattgtatactcgatgaaggactctggcagtgctgtttttaaataaatgatgtggcactgaccatgatcttctgtaagatgataaaactgttggaacagcgacagcctgccacagatgatgtcttcatgtcgcacctgtgttgcgcgggttgctggtccctgagaagctttgctcttaggattttccactcaccctgtcacctgtcagcctcgccttgatccctcacccccgactctggtgtggcagcctcagtgactgagctcctccgcccccctcctcagcagggctgactttccctttagcttgggaggctcagcatttctgtttagcctgccgcgatggcagcgcagcatttatgccggaggggcagtgagagcgtcaggcaaccagctaacactgcttattttgtctgcctatgggcttcatgtgagttgcctgccttcttttccaaacccctcggggcttgctgtcttccgaggccttgtaaatgggaagtattcaagcccatgtgtatgaactgatatcgttgtcacccccctttcatgactcgcttctattttcagggacctcaagaagaaccaaattctttggtactttccccggaaactacgtcaagaggctgtgaattgcgctccctccttctgtagaggccgcctgccagccatgcacctgcgtcaacgcgcctgaaacaccccgcgggcctcccgttgtcatgccttacggtttccaatgcgccgtcaccatctccacctgccaccaaaccaccagcagagtagccgccgctgctgtgagcctggggacgacatggcaggctggtccccctccgtgaaagtgtggattcctacttcctgctctaagctttgacacgtcaaaatgtgggatcagaaagaaaaaaatcatgatatttaaaaatggtcaaatatttgaggcaaaaaaaaaaaaaaaaagtgtctccaggaggctgtccagcctcgtggctccatttcaacatctccccccaggcgatgttctcccccaagacgaccagaaaattgtttattggggaatgctgtggtttgcattttcatattcttcgcttggcagtgtgtattcttttcacaagtttgcctagtgtcttggtttacacaatatgacaactgtaactgtactttagctattgtttgcctgcacatacatgttgtaatatgcacagtgattacaacctttaaagcaagaggaggcgagttaatttggatgagtgtgattttgctgattgaatgtgagttttcaaataggagtctttttctgcaatttgtttgcattttttagaagtgcaaacagtaagtaaataaaagccttcggtaataatcatgacaatacaagaggctgagctaggctacaggggaaaactattgtgttgtaaagttgcatcgctattttatattaaaatgtaatgatcagcatcatgaacaatgagctcttagtgttttatttatctgaaaaaatgtaagtaaaagcagtgttagtgagaggtgcaaagaattattctaacagacacctgaaagtatctgtaagcaatactagtaggtaagatttcactgtgtgtacacatacacatttgagattgtatgagaacatataatccatatgatatgttgtacattttatggaaatgtaatagaatctcacacattattttatagaaatagagtacagaagcatcacaagtattaaagttggttttagcaaggattaggattactacaattatttttactataataattatttttcttctatggaactcagaatcctggctacatttgaggacaggaatatgttgagcctgattttcctggtgtgtgtaaaatatttcctaggaataaattaggcactttttagaagcaatgttaaatcattcaggttttattttctgccctgaagcagaaatttaaaaaatgatattgggacctggaaggtttaatatggttcacagtgcctgaattacacctgctccgaaaactagctttgtatttcttatgactttgcataagaactgttcatctttggatcttgagcaccttacagataaaactttttatggcatctctttcatggacagtgatattgatcttttcacaatgtacgtagcctctagaattttgtacatatgtttgctctttttttgtacagactagttgttgagaaaacaggggcgtttcctaatttggtctttatcctgcgacaacactttcagcagactagcctctccttatctcacagatcacaagcacccctagatagtgtgattctgtcagatagcatttatgcaaaaatctatgaagttaaaagatcgtagaagccaaatgaaatgtacatatctactgactgatgacaagggaatttcattaggaagaaggtaaagaaacatcgttgagtagcctaccttgatttctgtcaagttcataaccagcttcatattttaaaggcttcaggtttgaaattaagtcaactgcatgcagctttgctgataaatgaataattctctttgatgccatttatgagaaaagacttcaatatctgttgcctgtcatatttaagaaaaattactgtttctactctctgtatctgattttaaaagaaaaaactattcatacctggcttccaggtaattgactttgaattcttacaagcaaaggtcattgtgtttttcttgaatagacatctaataaattttgcttggaagtatacttcagtttttcttcttgacatttatctttataaaaattgtgtattttattccaacttgttaaactaagagaaaatgcattttgttgtgtgttcttttaacacaaacatggagaaaagctgtgtcagcatcagctcagagaagaaatatttttaaacccaccaccaaagctcatttgctaaacgttctttggctaaaaattgcccttcagttaaaacaatacattgtaaaatatttctgcctcaaaacagctagttttccaaggaggggttagttacaaggagttgtaagcactttcccagttcaacactctgaaattttaaaatctttgccctaagcagcttcagcaccattggctcggcagcttctgcaaatgtccacaggctttcagtgaatttcaaatgatgggtggcggtggggtccccgctttctgccacacaaatgggaaagagccagcttgcctgcttggatcttttctcatataccttagtcccttcttgctctatgtgttttgacccttttccatatctatctcttaaatattcagaaatacggacattcctcttttgccaactcggttatcaaagatgtcttgtcacgttgcttccccttaacacccactctggtgccttctatgccataggataattcccactctatattagcattctgctaaaatg

SEQ ID NO: 5 - DNA, 7251 bp, Homo sapiens
tccttttattgtggatgaacaccacgtacatgccgtaaatgctccctaggctggctgcggctacaaggcagacccgggagctgagaatagaggaatacctgcccaagcaactcattctgcacagcagccgacaagacagcgattttcctgtgctggaatgtgcccatccaaagccaaccaatttgttggaaaatcagtcaaaatctaattttgatgttctgcaagttccctgggggccatgaagcacctggagctgagaggaccagccattttacttatggaaaacagtgtggcatattctgctgagcttcgccctggaagaagcctcttttatacatctcttcagggaagagagaagcaatgggcatgttagtatacaatgatcacagccacgcaggcctgcaagctgccttttggacaggctgttgactgccgttccaattagctgattggagaatgtggaatgcagagtgataatgctgcatatctgctatcaggcagcagcaaaggtttttgtcttgggaaggcaagctttccctgcaatattatctcagcagctccctagctgcttaccctgaaaacgagggatccaaacggagggtgttgcactctgctaacgctggtcctgtgcgtggctgtggcatatgagcggcaggtctgaaaaagcaggtgtgtgctgggacgggcactggactggaacgcaggcggacgctctcgggtttacctgcttcctgttaacagattgtgggctcccagggcatatgtctgcacgctgaggccgaggcggagaaggggcttcctgagcgtcccagtacactgacagagacacttggattggacttaatcttaaacctctggagttcaagaccttttaaaaagggctaaataaacaatctctacatgtaaaaggccactgactcctacttcctctgtatagagcaactgttgaactcagctgcctgtagggctggtccacagagtgagtcaccttagtcaattacagctgaactccttgttccactctttcttccttctcactactgcacttgactagtcttgaaaactgaagactttaataacaaactctccaaggtgaaaatgaacacagatagcggtgggtgtgctcgcaaacgtgccgccatgtctgttacgctaacatctgtgaagagagtgcaaagttctccaaacctattggctgcagggcgtgattctcagtcaccagactcagcttggagatcttacaatgatggcaatcaggagacactgaacggagatgctacatattcctctcttgcagcaaaaggttttagaagcgttcgaccaaacctacaagataaaagatcaccaactcagagccagataacagtgaatggaaactcaggaggtgccgtgagtcccatgagttactatcagaggccgttttccccctcggcatattctctcccagcctcactcaactccagcattgtcatgcagcacggcacatccctcgattccacagacacatatccccagcatgcgcagtctctggatggcaccaccagcagctctatccccctgtaccgatcctcagaggaagagaagagagtgacagtcatcaaagccccgcattacccagggatcgggcccgtggatgaatccggaatccccacagcaattagaacgacagtcgaccggcccaaggactggtacaagacgatgtttaagcaaattcacatggtgcacaagccggatgatgacacagacatgtataatactccttatacatacaatgcaggtctgtacaacccaccctacagtgctcagtcacaccctgctgcaaagacccaaacctacagacctctttccaaaagccactccgacaacagccccaatgcctttaaggatgcgtcctccccagtgcctcccccacatgttccacctccagtcccgccgcttcgaccaagagatcggtcttcaacagaaaaacatataagagacaatttccccaggtctattaataagagacatttttgttctaggcatgactgggatcctccagacagaaaagtggacacaagaaaatttcggtctgagccaaggagtatttttgaatatgaacctggcaagtcatcaattcttcagcatgaaagaccaccccctctcccaacaactccgacacctgttccaagggaacctggccggaagcctctttctagctcccgactcggagaagtcactggtagcccctcccctccgccccggagtggcgcccccacaccaagctcgcgcgccccggctctgtctcccacccggactgatcgcataaatccagatgacatagatttagaaaatgagccctggtataaattcttttcagaactggagtttggacgcccgcctcctaaaaagcctctggactatgttcaagatcattcttctggtgttttcaatgaggcctccttgtatcagtcctctatagacagaagcctggaaagacccatgagttctgcaagcatggccagtgacttcaggaagcggaggaagagcgagcctgcagtgggtccaccacggggcttgggagatcaaagtgcgagcaggactagcccaggccgagtggacctcccaggatcaagcaccactcttacaaagtctttcactagctcttctccttcttccccatcaagagcaaaaggtggggatgatagcaaaatatgtccatccctttgcagttactcagggctcaacggcaacccctccagtgagttagattactgtagcacttacagacagcacttggatgtccctcgggactcaccaagagccattagtttcaagaacggctggcaaatggcccggcaaaacgcagaaatctggagcagcacggaagaaaccgtctctcccaaaatcaaatcccggagctgtgacgatctcctaaacgacgactgcgatagcttcccggacccgaaagtcaagtcggaaagcatgggctccctgttatgtgaggaggactccaaggagagctgccccatggcgtgggggtccccctacgtcccggaggttcgcagtaacggcagatcaaggatcagacacaggtcagcccgcaacgccccggggttcctgaagatgtacaagaaaatgcaccgcatcaaccgcaaggacctgatgaactccgaggtgatctgctccgtgaagtccaggattctgcagtacgagagcgagcagcagcacaaggacctgctgcgcgcctggagccagtgctccacggaggaggtgccccgggacatggtgcccacacgcatctccgaattcgaaaagctgatccagaagtccaaatccatgccaaatttaggggatgacatgctgtctcccgtaaccctagaaccaccgcaaaatggcctatgtcccaagaggcggttttccattgagtatttgctggaggaagaaaatcaaagcggcccccccgctcggggccggcgaggctgccagtctaacgccctggtgcccattcacattgaagtcaccagcgatgagcagccccgagcacacgtggagttttccgacagcgaccaggacggggttgtgtccgaccacagtgactacattcacctagaggggtcatccttctgcagtgaaagtgactttgatcacttttccttcacatcctccgaaagcttttacggatccagccaccaccaccaccatcaccaccaccaccaccaccgccacctcatcagctcctgcaaaggcaggtgcccggcctcctacactcgatttaccacaatgttaaaacacgaaagagccagacacgaaaacaccgaggagcccagaaggcaagaaatggaccctggcctttctaaacttgcttttctagtcagtcctgtgcctttccggaggaaaaaaaattcggctcctaagaaacagactgaaaaggcaaaatgtaaagcatctgtgtttgaggctctggactctgcccttaaagacatctgtgaccaaattaaagctgaaaagaaaagggggagcttgccggacaacagcatcctgcaccgcctcatcagtgagctgctgccagatgttcccgagaggaactcatccctgagagcgctgaggaggagccccctgcaccagcctctccacccactgcctcccgatggtgctattcattgtccaccctaccagaatgactgcgggagaatgccccgcagtgcctctttccaagacgtggacacagccaacagcagctgccaccaccaagaccgtggcggtgcactccaagaccgtgagtcccctagaagttactcatccactttgactgacatggggagaagtgcaccaagggaaagaagaggaactccagaaaaagagaaattgcctgcaaaagctgtttatgattttaaggctcagacatctaaggagttgtcatttaagaaaggagatactgtctacatcctcaggaaaattgatcaaaattggtatgagggagaacaccacgggagagtgggcatcttcccgatctcatacgtagagaaactcacacctcctgagaaagcacagcctgcaagaccacctccgccagcccagcccggagaaatcggagaagctatagccaaatacaacttcaacgcagacacaaatgtggagctgtcactgagaaagggagatagagttattcttcttaaaagagttgatcaaaactggtatgaaggtaaaatcccaggaaccaacagacaaggcatcttccctgtttcctatgtggaggtcgtcaagaagaacacaaaaggtgctgaggactaccctgaccctccaataccccacagctattctagtgataggattcacagcttgagctcaaataagccacagcgtcctgtgtttactcatgaaaatattcaaggtgggggggaaccctttcaaagtgttgtttcaggctctgtataactatactcccaggaatgaagatgagctggagctcagagaaagtgatgtcattgatgtcatggaaaagtgtgatgacggctggtttgtggggacctcaagaagaaccaaattctttggtactttccccggaaactacgtcaagaggctgtgaattgcgctccctccttctgtagaggccgcctgccagccatgcacctgcgtcaacgcgcctgaaacaccccgcgggcctcccgttgtcatgccttacggtttccaatgcgccgtcaccatctccacctgccaccaaaccaccagcagagtagccgccgctgctgtgagcctggggacgacatggcaggctggtccccctccgtgaaagtgtggattcctacttcctgctctaagctttgacacgtcaaaatgtgggatcagaaagaaaaaaatcatgatatttaaaaatggtcaaatatttgaggcaaaaaaaaaaaaaaaaagtgtctccaggaggctgtccagcctcgtggctccatttcaacatctccccccaggcgatgttctcccccaagacgaccagaaaattgtttattggggaatgctgtggtttgcattttcatattcttcgcttggcagtgtgtattcttttcacaagtttgcctagtgtcttggtttacacaatatgacaactgtaactgtactttagctattgtttgcctgcacatacatgttgtaatatgcacagtgattacaacctttaaagcaagaggaggcgagttaatttggatgagtgtgattttgctgattgaatgtgagttttcaaataggagtctttttctgcaatttgtttgcattttttagaagtgcaaacagtaagtaaataaaagccttcggtaataatcatgacaatacaagaggctgagctaggctacaggggaaaactattgtgttgtaaagttgcatcgctattttatattaaaatgtaatgatcagcatcatgaacaatgagctcttagtgttttatttatctgaaaaaatgtaagtaaaagcagtgttagtgagaggtgcaaagaattattctaacagacacctgaaagtatctgtaagcaatactagtaggtaagatttcactgtgtgtacacatacacatttgagattgtatgagaacatataatccatatgatatgttgtacattttatggaaatgtaatagaatctcacacattattttatagaaatagagtacagaagcatcacaagtattaaagttggttttagcaaggattaggattactacaattatttttactataataattatttttcttctatggaactcagaatcctggctacatttgaggacaggaatatgttgagcctgattttcctggtgtgtgtaaaatatttcctaggaataaattaggcactttttagaagcaatgttaaatcattcaggttttattttctgccctgaagcagaaatttaaaaaatgatattgggacctggaaggtttaatatggttcacagtgcctgaattacacctgctccgaaaactagctttgtatttcttatgactttgcataagaactgttcatctttggatcttgagcaccttacagataaaactttttatggcatctctttcatggacagtgatattgatcttttcacaatgtacgtagcctctagaattttgtacatatgtttgctctttttttgtacagactagttgttgagaaaacaggggcgtttcctaatttggtctttatcctgcgacaacactttcagcagactagcctctccttatctcacagatcacaagcacccctagatagtgtgattctgtcagatagcatttatgcaaaaatctatgaagttaaaagatcgtagaagccaaatgaaatgtacatatctactgactgatgacaagggaatttcattaggaagaaggtaaagaaacatcgttgagtagcctaccttgatttctgtcaagttcataaccagcttcatattttaaaggcttcaggtttgaaattaagtcaactgcatgcagctttgctgataaatgaataattctctttgatgccatttatgagaaaagacttcaatatctgttgcctgtcatatttaagaaaaattactgtttctactctctgtatctgattttaaaagaaaaaactattcatacctggcttccaggtaattgactttgaattcttacaagcaaaggtcattgtgtttttcttgaatagacatctaataaattttgcttggaagtatacttcagtttttcttcttgacatttatctttataaaaattgtgtattttattccaacttgttaaactaagagaaaatgca
